(19) United States
(12) Patent Application Publication
(10) Pub. No.: US 2026/0125708 A1
(43) Pub. Date: May 7, 2026

(54) Engineered Integration Enzymes and Uses Thereof

(71) Applicant: Basecamp Research Ltd, London (GB)

(72) Inventor: Jesse Christine COCHRANE, Cambridge, MA (US)

(21) Appl. No.: 19/200,601

(22) Filed: May 6, 2025

Related U.S. Application Data
(60) Provisional application No. 63/643,230, filed on May 6, 2024.

(51) Int. Cl. C12N 15/90; C12N 5/074; C12N 5/0789; C12N 9/12; C12N 9/22; C12N 15/11; C12N 15/62; C12N 15/85

(52) U.S. Cl. CPC C12N 15/90; C12N 5/0647; C12N 5/0696; C12N 9/1276; C12N 9/222; C12N 15/111; C12N 15/62; C12N 15/85; C07K 2319/81; C12N 2310/20; C12N 2510/00; C12N 2800/22; C12Y 207/07049

(57) ABSTRACT

The present disclosure provides compositions comprising engineered integration enzymes/eLSR and methods of using the same. In certain embodiments, the engineered integration enzyme comprises mutation(s) that substantially maintain or enhance integration activity at a pair of cognate integration recognition sites, and substantially decrease off-target integration activity at a pair of off-target integration recognition sites, when compared to a corresponding large serine integrase without said one or more substitutions (cLSR). The eLSR may further comprise a stabilization domain that increases the stability of the integration enzyme as compared to integration enzymes not comprising the stabilization domain.

### 1. CROSS-REFERENCE TO RELATED APPLICATIONS

[0001] This application claims the benefit of U.S. Provisional Application No. 63/643,230, filed May 6, 2024, which is hereby incorporated in its entirety by reference herein.

### 2. SEQUENCE LISTING

[0002] The instant application contains a Sequence Listing which has been submitted by Patent Center and is hereby incorporated by reference in its entirety. Said XML copy, created on Sep. 11, 2025, is named 62809US_CRF_Sequence Listing.xml and is 1,196,506 bytes in size.

### 3. BACKGROUND

[0003] Programmable, efficient, and multiplexed genome integration of large, diverse DNA cargo independent of DNA repair remains an unsolved challenge of genome editing. Current gene integration approaches require double strand breaks that evoke DNA damage responses and rely on repair pathways that are inactive in terminally differentiated cells. Furthermore, CRISPR-based approaches that bypass double stranded breaks, such as Prime editing, are limited to modification or insertion of short sequences.

[0004] While targeted integration of large donor DNA sequences at specific target locations/genomic sites have been achieved using certain large serine integrases (LSRs), occasional integration of the donor DNA at unintended non-target locations/genomic sites can be problematic, in that two classes of potential genotoxic events may occur due to such integrase-mediated off-target integration—DNA mutagenesis and DNA structural variants formation. Specifically, DNA mutagenesis could potentially arise via DNA free-end formation from LSR cleavage or abortive integration. Meanwhile, DNA structural variants could potentially arise via cryptic recombination between cryptic integrase sites in the human genome leading to off-target cargo insertion, structural variants, or chromosomal rearrangements.

[0005] There is a need in the art for techniques which address and overcome these shortcomings and enable the co-delivery of gene editor constructs and associated donor templates for the insertion and/or deletion of large sequences into cells for therapeutic and circuit-based uses for broad purposes, across eukaryotic as well as prokaryotic systems.

### 4. SUMMARY

[0006] The present disclosure describes integration enzymes (e.g., engineered large serine integrase or eLSR) engineered such that upon being introduced into a cell, the integration enzyme has increased fidelity/specificity towards the cognate integration recognition sequences/sites at the target integration sequence, over off-target integration recognition sequences/sites at off-target integration sequences. The engineered large serine integrase (eLSR) described herein comprises one or more substitutions (e.g., substitutions in a zinc ribbon domain (ZD)) that substantially maintain or enhance integration activity at a pair of cognate integration recognition sites, and substantially decrease off-target integration activity at a pair of off-target integration recognition sites, when compared to a corresponding large serine integrase without said one or more substitutions (cLSR).

[0007] In certain embodiments, the one or more substitutions are in a zinc ribbon domain (ZD) of the cLSR.

[0008] In certain embodiments, the cLSR comprises an amino acid sequence that is at least 80% identical to any one of (a) SEQ ID NOs: 378-393; (b) SEQ ID NOs: 85-158 of WO2023/177424 (incorporated herein by reference); and (c) SEQ ID NOs: 1-16 and 163-1162 and 3166-3175 of WO2023/070031 (incorporated herein by reference).

[0009] In certain embodiments, the cLSR is a BxB1 polypeptide, SsuINT, SssINT, SscINT, Ssc2INT, SsdINT, SmcINT, UhmINT, SacINT, RsaINT, Rsa2INT, Bxb1, Tp91NT, Bt1INT, BceINT, BcyINT, SluINT, or a functional fragment/variant thereof.

[0010] In certain embodiments, the cLSR is a BxB1 polypeptide or a functional fragment/variant thereof.

[0011] In certain embodiments, the cLSR comprises an amino acid sequence having at least 80% sequence identity to SEQ ID NO: 388. In certain embodiments, the cLSR has an amino acid sequence of SEQ ID NO: 388.

[0012] In certain embodiments, the pair of cognate integration recognition sites are: an attB sequence and an attP sequence; or a modified AttB sequence and a modified AttP sequence.

[0013] In certain embodiments, the pair of off-target integration recognition sites are CAS031 attB sequence and CAS031 attP sequence; or CAS421 attB sequence and CAS421 attP sequence. See FIG. 59.

[0014] In certain embodiments, at least one of the pair of cognate integration recognition sites is integrated into a mammalian cell genome at a target DNA sequence. In certain embodiments, the at least one of the pair of cognate integration recognition sites is integrated into the mammalian cell genome at the target DNA sequence by: (1) programmable addition through site-specific targeting elements (PASTE) using a n attachment site-containing guide RNA (atgRNA) and a gene editor polypeptide; (2) homology directed repair (HDR), such as short-fragment homologous recombination (SFHR); (3) ligation-assisted homologous recombination (LAHR); (4) ligation-assisted Replacer (e.g., Replacer 1 or Replacer 2) editing; or, (5) non-homologous end joining (NHEJ), such as homology-independent targeted insertion (HITI).

[0015] In certain embodiments, the one or more substitutions are at a position corresponding to residue 315, residue 318, residue 319, and/or residue 320 of SEQ ID NO: 388.

[0016] In certain embodiments, the one or more substitutions do not include A315F, A315G, A315H, A3151, A315M, A315N, A315S, A315T, A315W, A315Y, G3181, G318K, G318R, and G318W.

[0017] In certain embodiments, the one or more substitutions are at a position corresponding to residue 315 of SEQ ID NO: 388, residue 318 of SEQ ID NO: 388, residue 319 of SEQ ID NO: 388, or residue 320 of SEQ ID NO: 388. In certain embodiments, the one or more substitutions are at a position corresponding to residue 315 of SEQ ID NO: 388. In certain embodiments, the one or more substitutions are at a position corresponding to residue 318 of SEQ ID NO: 388. In certain embodiments, the one or more substitutions are at a position corresponding to residue 319 of SEQ ID NO: 388. In certain embodiments, the one or more substitutions are at a position corresponding to residue 320 of SEQ ID NO: 388.

[0018] In certain embodiments, the one or more substitutions comprise or consist of a substitution to D (Asp), E (Glu) or R (Arg) at the position corresponding to residue 315 of SEQ ID NO: 388. In certain embodiments, the one or more substitutions comprise or consist of a substitution to R (Arg) at the position corresponding to residue 315 of SEQ ID NO: 388.

[0019] In certain embodiments, the one or more substitutions comprise or consist of a substitution to E (Glu) at the position corresponding to residue 318 of SEQ ID NO: 388.

[0020] In certain embodiments, the one or more substitutions comprise or consist of a substitution to Q (Gln) at the position corresponding to residue 319 of SEQ ID NO: 388.

[0021] In certain embodiments, the one or more substitutions comprise or consist of a substitution to E (Glu), Q (Gln), or R (Arg) at the position corresponding to residue 320 of SEQ ID NO: 388. In certain embodiments, the one or more substitutions comprise or consist of a substitution to E (Glu) at the position corresponding to residue 320 of SEQ ID NO: 388. In certain embodiments, the one or more substitutions comprise or consist of a substitution to R (Arg) at the position corresponding to residue 320 of SEQ ID NO: 388.

[0022] In certain embodiments, the one or more substitutions comprise or consist of two of the three positions corresponding to residue 315 of SEQ ID NO: 388, residue 319 of SEQ ID NO: 388, and residue 320 of SEQ ID NO: 388.

[0023] In certain embodiments, the one or more substitutions comprise or consist of the position corresponding to residue 315 of SEQ ID NO: 388, and the position corresponding to residue 320 of SEQ ID NO: 388.

[0024] In certain embodiments, the one or more substitutions comprise or consist of a substitution to D (Asp), E (Glu) or R (Arg) at the position corresponding to residue 315 of SEQ ID NO: 388; and a substitution to E (Glu), Q (Gln), or R (Arg) at the position corresponding to residue 320 of SEQ ID NO: 388.

[0025] In certain embodiments, the one or more substitutions comprise or consist of a substitution to D at the position corresponding to residue 315 of SEQ ID NO: 388; and a substitution to E at the position corresponding to residue 320 of SEQ ID NO: 388.

[0026] In certain embodiments, the one or more substitutions comprise or consist of a substitution to E at the position corresponding to residue 315 of SEQ ID NO: 388; and a substitution to E at the position corresponding to residue 320 of SEQ ID NO: 388.

[0027] In certain embodiments, the one or more substitutions comprise or consist of a substitution to R at the position corresponding to residue 315 of SEQ ID NO: 388; and a substitution to E at the position corresponding to residue 320 of SEQ ID NO: 388.

[0028] In certain embodiments, the one or more substitutions comprise or consist of a substitution to D at the position corresponding to residue 315 of SEQ ID NO: 388; and a substitution to R at the position corresponding to residue 320 of SEQ ID NO: 388.

[0029] In certain embodiments, the one or more substitutions comprise or consist of a substitution to E at the position corresponding to residue 315 of SEQ ID NO: 388; and a substitution to R at the position corresponding to residue 320 of SEQ ID NO: 388.

[0030] In certain embodiments, the one or more substitutions comprise or consist of a substitution to R at the position corresponding to residue 315 of SEQ ID NO: 388; and a substitution to R at the position corresponding to residue 320 of SEQ ID NO: 388.

[0031] In certain embodiments, the integration activity at the pair of cognate integration recognition sites is at least about 200-fold, 300-fold, 400-fold, 500-fold, 600-fold, 700-fold, 800-fold, 900-fold, 1000-fold or more compared to the off-target integration activity at the pair of off-target integration recognition sites.

[0032] In certain embodiments, the eLSR further has increased stability (e.g., half-life) compared to a control integration enzyme not engineered to have increased stability. The increase in stability extends the capacity of the integration enzyme to mediate integration.

[0033] In one embodiment, the present disclosure provides integration enzymes having enhanced fidelity towards cognate integration recognition sequences over non-cognate integration recognition sequences, and further engineered to have increased stability, for use in site-specific genetic engineering using Programmable Addition via Site-Specific Targeting Elements (PASTE) (see Ionnidi et al.; doi: 10.1101/2021.11.01.466786; the entirety of Ionnidi et al. is incorporated by reference), transposon-mediated gene editing, or other suitable gene editing or gene incorporation technology. Non-limiting examples of PASTE are also described in U.S. Pat. No. 11,572,556 and PCT Publication Nos. WO 2022/087235A and WO 2023/077148A1, each of which are hereby incorporated by reference in their entireties.

[0034] In typical embodiments, the engineered integration enzyme includes an integration enzyme or fragment thereof having mutation(s) that substantially maintain or enhance integration activity at a pair of cognate integration recognition sites, and substantially decrease off-target integration activity at a pair of off-target integration recognition sites, optionally an at least first stabilization domain, and further optionally a nuclear localization signal.

[0035] In certain embodiments, the eLSR further comprises (a) a first stabilization domain; and, (b) a first nuclear localization signal (NLS).

[0036] In some embodiments, the integration enzyme/eLSR or fragment thereof comprises integration enzyme, recombinase, or transposase activity.

[0037] In some embodiments, the integration enzyme is a large serine integrase.

[0038] In some embodiments, the engineered integration enzyme/eLSR binds to a cognate pair of integration recognition sites.

[0039] In some embodiments, the cognate pair of integration recognition sites is selected from: an attB and an attP and a modified AttB and a modified AttP.

[0040] In some embodiments, the engineered integration enzyme/eLSR further comprises a second stabilization domain.

[0041] In some embodiments, the first stabilization domain and/or second stabilization domain are positioned in the engineered integration enzyme such that the engineered integration enzyme and the first and/or second stabilization domains are an in-frame fusion.

[0042] In some embodiments, the first stabilization domain and/or the second stabilization domain are located N-terminal to the eLSR, C-terminal to the eLSR, and/or between two consecutive amino acid residues of the eLSR.

[0043] In some embodiments, the first stabilization domain and/or second stabilization domain are located N-terminus to the integration enzyme/eLSR or fragment thereof.

[0044] In some embodiments, the first stabilization domain and/or second stabilization domain are located C-terminus to the integration enzyme/eLSR or fragment thereof.

[0045] In some embodiments, the first stabilization domain and/or second stabilization domain are located between two consecutive amino acid residues in the amino acid sequence of the integration enzyme/eLSR or fragment thereof.

[0046] In some embodiments, the two consecutive amino acid residues in the amino acid sequence of the integration enzyme/eLSR are located in a N-terminal catalytic domain; a recombinase domain, or one or more zinc ribbon domain.

[0047] In some embodiments, the two consecutive amino acid residues in the amino acid sequence of the integration enzyme correspond amino acid residues between the N-terminal catalytic domain and the recombinase domain or between the recombinase domain and one of the zinc ribbon domains.

[0048] In certain embodiments, the two consecutive amino acid residues of the eLSR are located in a N-terminal catalytic domain (NTD) of the eLSR; in a recombinase domain (RD) of the eLSR; in a zinc ribbon domain (ZD) of the eLSR; between the NTD and the RD of the eLSR; or between the RD and the ZD of the eLSR

[0049] In some embodiments, the stabilization domain is selected from: a stabilon motif and a exin21 motif. In certain embodiments, the stabilization domain comprises a stabilon motif and/or an exin2l motif.

[0050] In some embodiments, the stabilization domain comprises the stabilon motif, and wherein the stabilon motif has at least 80% sequence identity to a sequence of

(SEQ ID NO: 583
KDKDKKSDGKDSQKK
or
(SEQ ID NO: 584)
KDKKSDGKDSQKK.

[0051] In some embodiments, the stabilization domain comprises the exin2l motif, and wherein the exin2l motif has a sequence of QPRFAAA (SEQ ID NO: 585) or a sequence of QPRFAAA (SEQ ID NO: 585) within one, two or three amino acid substitutions.

[0052] In some embodiments, the second stabilization domain comprises a stabilon motif and/or an exin21 motif.

[0053] In some embodiments, the engineered integration enzyme further comprises one or more additional stabilization domains.

[0054] In some embodiments, the one or more additional stabilization domains comprises a stabilon motif and/or a exin2l motif.

[0055] In some embodiments, the engineered integration enzyme further comprises at least a first tag.

[0056] In some embodiments, the engineered integration enzyme further comprises a second tag.

[0057] In some embodiments, the first tag and/or the second tag are position in the engineered integration enzyme/eLSR such that the engineered integration enzyme/eLSR and the first and/or second tag are an in-frame fusion.

[0058] In some embodiments, the first tag and/or second tag are selected from: an HA tag, a HiBit tag, strep tag, and SUMO tag.

[0059] In some embodiments, the engineered integration enzyme/eLSR further comprises one or more linkers.

[0060] In some embodiments, the one or more linkers is a glycine serine linker selected from:

(SEQ ID NO: 677)
GS, GSG, or GGGS.

[0061] In some embodiments, the engineered integration enzyme/eLSR comprises an orientation from N-terminus to C-terminus: N-I-S; I-S-N; S-I-N; N-S-I; N-X₁-I-S; I-X₁-S-N; S-X₁-I-N; N-X₁-S-I; N-I-X₁-S; I-S-X₁-N; S-I-X₁-N; N-S-X₁-I; N-X₁-I-X₂-S; I-X₁-S-X₂-N; S-X₁-I-X₂-N; or N-X₁-S-X₂-I; wherein I is the eLSR without the linker, the stabilization domain, and the first NLS; X₁ is a first linker (when present); S is the stabilization domain; X₂ is a second linker (when present); and N is the first NLS (when present).

[0062] In certain embodiments, the eLSR further comprises: (a) a first amino acid modification that increases the stability of the eLSR as compared to the eLSR without said first amino acid modification; and; and (b) a second nuclear localization signal (NLS).

[0063] In some embodiments, the first amino acid modification is located in a degron motif.

[0064] In some embodiments, the first amino acid modification is an amino acid substitution, an insertion, a deletion, or a combination thereof.

[0065] In some embodiments, the first amino acid modification is an amino acid substitution of L275V in SEQ ID NO: 388.

[0066] In some embodiments, the engineered integration enzyme/eLSR is linked to a gene editor polypeptide.

[0067] In some embodiments, the C-terminus of the engineered integration enzyme/eLSR is linked to the gene editor polypeptide.

[0068] In some embodiments, the C-terminus of the gene editor polypeptide is linked to the engineered integration enzymes/eLSR.

[0069] In some embodiments, the engineered integration enzyme/eLSR is linked to the gene editor polypeptide by in-frame fusion.

[0070] In some embodiments, the engineered integration enzyme/eLSR is linked to the gene editor polypeptide by a linker.

[0071] In some embodiments, the linker is a peptide fused in-frame between the engineered integration enzyme/eLSR and the gene editor polypeptide.

[0072] In some embodiments, the one or more linkers is selected from: Table 3.

[0073] In some embodiments, the gene editor polypeptide comprises a DNA binding domain and a reverse transcriptase.

[0074] In another aspect, this disclosure features a polynucleotide comprising a nucleic acid sequence encoding any of the engineered integration enzymes/eLSR described herein or any of the engineered integration enzymes/eLSRs linked to the gene editor polypeptides described herein.

[0075] In some embodiments, the nucleic acid sequence encoding the eLSR and/or the fusion is codon optimized (e.g., codon-optimized for expression in a mammalian cell, such as a human cell).

[0076] In some embodiments, the codon optimization is performed using an algorithm.

[0077] In some embodiments, the nucleic acid sequence encoding the eLSR and/or the fusion is optimized based on secondary structure that confers increased stability of the polynucleotide.

[0078] In some embodiments, the nucleic acid sequence of the engineered integration enzyme/eLSR is optimized based on a linear design algorithm.

[0079] In another aspect, this disclosure features a vector comprising any of the nucleic acid sequences described herein.

[0080] In another aspect, this disclosure features a host cell comprising any of the the vectors described herein.

[0081] In another aspect, this disclosure features a fusion protein, comprising: (a) a DNA binding domain, optionally comprising a nickase activity; (b) a reverse transcriptase; and (c) any of the engineered integration enzymes/eLSR described herein, wherein at least any two of elements (a), (b), or (c) are linked via at least a first C-terminal linker.

[0082] In some embodiments, the C-terminal linker comprises a sequence in Table 3.

[0083] In another aspect, this disclosure features a polynucleotide comprising any of the nucleic acid sequences encoding the all-in-one fusion protein.

[0084] In another aspect, this disclosure features a vector comprising any of the nucleic acid sequences described herein.

[0085] In another aspect, this disclosure features a host cell comprising any of the vectors described herein.

[0086] In another aspect, this disclosure features a system for site-specifically integrating a donor polynucleotide template into a mammalian cell genome at a target DNA sequence, comprising: an attachment site containing gRNA (atgRNA) comprising at least a portion of an at least first integration recognition site; a gene editor polypeptide comprising a DNA binding nickase domain linked to a reverse transcriptase domain capable of incorporating the integration recognition site into the target DNA sequence, any of the engineered integration enzymes/eLSR described herein; and a donor polynucleotide template linked to a sequence that is an integration cognate of the integration recognition site present in the atgRNA, whereby the gene editor polypeptide site-specifically integrates the integration recognition site into the target DNA sequence, whereby the engineered integration enzyme/eLSR integrates the donor polynucleotide template into the target DNA sequence at the integration recognition site.

[0087] In some embodiments, the first atgRNA comprises: (i) a domain that is capable of guiding the gene editor polypeptide to the target DNA sequence; and (ii) a reverse transcriptase (RT) template that comprises at least a portion of an at least first integration recognition site, whereby the at least portion of the at least first integration recognition site is integrated into the genome of the cell at the target sequence.

[0088] In some embodiments, the system further comprises a second atgRNA.

[0089] In some embodiments, the first atgRNA and the second atgRNA are an at least first pair of atgRNAs, wherein the at least first pair of atgRNAs have domains that are capable of guiding the gene editor polypeptide to the target DNA sequence; the first atgRNA further includes a first RT template that comprises at least a portion of an at least first integration recognition site; the second atgRNA further includes a second RT template that comprises at least a portion of the first integration recognition site, and the first atgRNA and the second atgRNAs collectively encode the entirety of the first integration recognition site, whereby the least first integration recognition site is integrated into the genome of the cell at the target sequence.

[0090] In some embodiments, where, upon introducing the system into the cell, the engineered integration enzyme/eLSR enhances integration fidelity as well as efficiency of the donor polynucleotide template at the site-specifically integrated integration recognition site as compared to the integration efficiency of a system using a non-engineered integration enzyme (a corresponding cLSR) to integrate donor polynucleotide template at the site-specifically integrated integration recognition site.

[0091] In another aspect, this disclosure features a method for site-specifically integrating a donor polynucleotide template into a mammalian cell genome at a target DNA sequence, comprising: incorporating an integration recognition site into the genome by delivering into the cell: an attachment site containing guide RNA (atgRNA) comprising at least a portion of an at least first integration recognition site; and a gene editor polypeptide or polynucleotide encoding a gene editor polypeptide, wherein the gene editor polypeptide comprises a DNA binding nickase domain linked to a reverse transcriptase domain and is capable of incorporating the integration recognition site into the target DNA sequence; and optionally, a nicking gRNA; and integrating the donor polynucleotide template into the genome by delivering into the cell: any of the engineered integration enzymes/eLSR described herein; and a donor polynucleotide template, wherein the donor polynucleotide template is linked to a sequence that is an integration cognate of the integration recognition site present in the atgRNA, and wherein the donor polynucleotide template is integrated into the genome at the incorporated genomic integration recognition site by the integration enzyme.

[0092] In some embodiments, the atgRNA, the gene editor polypeptide or polynucleotide encoding the gene editor polypeptide, the optional nicking gRNA, the engineered integration enzyme/eLSR, and the donor polynucleotide template are introduced into the cell concurrently.

[0093] In some embodiments, the first atgRNA comprises: (i) a domain that is capable of guiding the gene editor polypeptide to the target DNAsequence; and (ii) a reverse transcriptase (RT) template that comprises at least a portion of an at least first integration recognition site, whereby the at least portion of the at least first integration recognition site is integrated into the genome of the cell at the target sequence.

[0094] In some embodiments, the method further comprises a second atgRNA.

[0095] In some embodiments, the first atgRNA and the second atgRNA are an at least first pair of atgRNAs, wherein the at least first pair of atgRNAs have domains that are capable of guiding the gene editor polypeptide to the target DNA sequence; the first atgRNA further includes a first RT template that comprises at least a portion of an at least first integration recognition site; the second atgRNA further includes a second RT template that comprises at least a portion of the first integration recognition site, and the first atgRNA and the second atgRNAs collectively encode the entirety of the first integration recognition site, whereby the at least first integration recognition site is integrated into the genome of the cell at the target sequence.

[0096] In some embodiments, the method enhances integration fidelity and efficiency of the donor polynucleotide template at the site-specifically integrated integration recognition stie at the double-stranded target DNA sequence as compared to the integration efficiency of the donor polynucleotide template at the site-specifically integrated recognition site when using a method that does not comprise the engineered integration enzyme/eLSR.

[0097] In some embodiments, the cell is in a human subject. In some embodiments, the human subject has a disease or condition selected from the group consisting of phenylketonuria (PKU), atherosclerotic cardiovascular disease (ASCVD), homocystinuria, and hemochromatosis.

[0098] In some aspects, disclosed herein is a use of the fusion protein, the polynucleotide, the vector, and/or the system of any preceding aspect in treatment of a disease or condition in a subject, wherein the disease or condition is selected from the group consisting of phenylketonuria (PKU), atherosclerotic cardiovascular disease (ASCVD), homocystinuria, and hemochromatosis.

[0099] In some aspects, disclosed herein is a cell comprising the fusion protein, the polynucleotide, the vector, and/or the system of any preceding aspect. In some embodiments, the cell is a pleiopluripotent cell (such as an induced pluripotent stem cell) or a hematopoietic cell differentiated from a pleiopluripotent cell. In some embodiments, the hematopoietic cell is a natural killer cell (NK) (such as an iNK cell).

[0100] In some aspects, disclosed herein is a use of the cell of any preceding aspect (e.g., iPSC or iNK cell) in treatment of a disease or condition in a subject, wherein the disease or condition is Systemic Lupus Erythematosus (SLE), Lupus Nephritis (LN), IgA Nephropathy (IgAN), Membranous nephropathy (MN), Minimal change disease (MCD), ANCA Vasculitis, Myasthenia Gravis (MG), Systemic sclerosis (SS), C3 glomerulopathy (C3GN), Idiopathic thrombocytopenic purpura (ITP), Multiple Sclerosis (MS), Guillain-Barre syndrome (GBS), Chronic Inflammatory Demyelinating polyradiculoneuropathy (CIDP), Pemphigus Vulgaris (PV), Bullous Pemphigoid (BP), Autoimmune Hepatitis (AIH), Autoimmune Hemolytic Anemia (AIHA), Dermatomyositis (DM), Polymyositis (PM), Scleroderma, Neuromyelitis optica spectrum disorders (NMOSD), Myelin oligodendrocyte glycoprotein antibody associated disease (MOGAD), Churg-Strauss syndrome/eosinophilic granulomatosis with polyangiitis (EGPA), CREST syndrome/limited cutaneous systemic sclerosis, Devic's disease/neuromyelitis optica (NMO), Granulomatosis with polyangiitis (GPA)/Wegener's granulomatosis, Henoch-Schonlein purpura/IgA vasculitis, autoimmune thrombocytopenic purpura/autoimmune thrombocytopenia, or Transverse Myelitis™. In some embodiments, the disease or condition is selected from the group consisting of systemic lupus erythematosus (SLE), IgA nephropathy, membranous nephropathy, and minimal change disease.

### 5. BRIEF DESCRIPTION OF THE DRAWINGS

[0101] These and other features, aspects, and advantages of the present invention will become better understood with regard to the following description, and accompanying drawings, where:

[0102] FIGS. 1-53 provide embodiments concerning the rate of cargo integration by integrase (such as wild-type integrase comprising Large Serine Integrases (LSRs) and their engineered high-fidelity variants thereof) into target DNA/genomic locations, while FIGS. 54-xxx provide embodiments concerning the fidelity of cargo integration by integrase (such as the engineered LSRs, or eLSRs) into the intended target DNA/genomic locations, as opposed to unintended/undesired integration into non-target DNA/genomic locations. It should be understood that any one embodiment, such as embodiments described solely under one aspect of the invention, can be combined with any other one or more additional embodiments, unless such combination is expressly disclaimed or improper.

[0103] FIG. 1 shows a non-limiting illustration of a gene editor construct packaged within a lipid nanoparticle (LNP).

[0104] FIG. 2 illustrates the donor template (i.e., “cargo” or “payload” or “template polynucleotide”)) packaged within a vector.

[0105] FIG. 3 illustrates integrase-mediated self-circularization of the donor template (template polynucleotide) within viral genome. The circularized donor template is capable of being genomically incorporated into an orthogonal integrase target recognition site (i.e., “beacon”).

[0106] FIG. 4 shows non-limiting illustrations of a gene editor construct packaged within a lipid nanoparticle and an atgRNA, ngRNA, and donor template (i.e., template polynucleotide encoding a gene of interest) packaged within a vector. GOI=gene of interest. PGI=programmable gene insertion. U6=U6 promoter. atgRNA=attachment site-containing guide RNA (atgRNA).

[0107] FIG. 5 shows non-limiting illustrations of a gene editor construct (e.g., mRNA encoding PE2-BxB1) and a nicking guide RNA (ngRNA) packaged within a lipid nanoparticle (LNP) and an atgRNA and donor template (i.e., template polynucleotide encoding a gene of interest) packaged within a vector.

[0108] FIGS. 6A-6B show non-limiting illustrations of three self-complementary AAV (scAAV) genomes capable of recombinase/integrase-mediated self-circularization. FIG. 6A shows the structure of the three self-complementary AAV (scAAV) genomes capable of recombinase/integrase-mediated self-circularization. FIG. 6B shows non-limiting examples of sequences that enable self-circularization (e.g., LoxP AttP GT (SEQ ID NO: 568 and SEQ ID NO: 569); FRT AttP GT (SEQ ID NO: 570 and SEQ ID NO: 571); and AttB CC AttP GT (SEQ ID NO: 572 and SEQ ID NO: 573)). GT indicates an AttP site with a GT dinucleotide. AttB CC indicates an AttB site with a CC dinucleotide. LoxP=a LoxP recombinase recognition site. FRT=a FRT recombinase recognition site.

[0109] FIG. 7 shows a non-limiting illustration of recombinase/integrase-mediated intramolecular circularization products.

[0110] FIGS. 8A-8B show non-limiting illustrations of a ddPCR assay and intramolecular circularization ddPCR detection probes. FIG. 8A shows a non-limiting illustration of the ddPCR strategy. FIG. 8B shows non-limiting examples of the universal probe (SEQ ID NO: 574 and SEQ ID NO: 575) and an AttR probe (SEQ ID NO: 576 and SEQ ID NO: 577) that can be used in the assay shown in FIG. 8A.

[0111] FIG. 9 shows a non-limiting illustration of a pDNA genome and AAV transfection and screening protocol.

[0112] FIG. 10 shows data for circularization of AAV pDNA and packaged AAV genomic DNA with Bxb1.

[0113] FIG. 11 shows data for Cre-, FLPe-, and Bxb1-mediated circularization of AAV pDNA confirmed by ddPCR.

[0114] FIG. 12 shows Cre-, FLPe-, and Bxb1-mediated circularization of packaged AAV confirmed by ddPCR

[0115] FIG. 13 shows percent circularization between the Bxb1-mediated attR scar ddPCR probe (“attR probe” described in FIG. 8B) and the universal ddPCR probe (“universal probe” described in FIG. 8B).

[0116] FIGS. 14A-14E shows analysis of AttP variants. FIG. 14A shows a non-limiting schematic of AttP mutations tested for improving integration efficiency (SEQ ID NOS: 394 and 540-542, respectively, in order of appearance). FIG. 14B shows integration efficiencies of wildtype and mutant AttP sites across a panel of AttB lengths. FIG. 14C shows a non-limiting schematic of multiplexed integration of different cargo sets at specific genomic loci. Three fluorescent cargos (GFP, mCherry, and YFP) are inserted orthogonally at three different loci (ACTB, LMNB1, NOLC1) for in-frame gene tagging. FIG. 14D shows orthogonality of top 4 AttB/AttP dinucleotide pairs evaluated for GFP integration with PASTE at the ACTB locus. FIG. 14E shows efficiency of multiplexed PASTE insertion of combinations of fluorophores at ACTB, LMNB1, and NOLC1 loci. Data are mean (n=3) s.e.m.

[0117] FIG. 15 illustrates a schematic of single atgRNA and dual atgRNA approaches for beacon placement (“integration recognition site”).

[0118] FIG. 16 shows percent beacon placement in primary mouse hepatocytes (PMH) following delivery of mRNA to deliver a polynucleotide encoding a gene editor polynucleotide construct and an AAV to deliver the first and second atgRNA according to the following conditions: (i) concurrent delivery (“co-dose”), (ii) AAV delivery followed by a “1-day delay” before delivery of the mRNA, or (iii) AAV delivery followed by a “2-day delay” before delivery of the mRNA.

[0119] FIG. 17 shows percent beacon placement in primary human hepatocytes (PHH) following delivering of mRNA to deliver a polynucleotide encoding a gene editor polynucleotide construct and an AAV to deliver the first and second atgRNA. The mRNA and AAV were delivered concurrently.

[0120] FIG. 18 shows percent in vivo beacon placement in the Nolc1 locus of mice following delivery of a polynucleotide encoding a gene editor polynucleotide construct using a lipid nanoparticle (LNP) and a first atgRNA and second atgRNA using an AAV. % BP=% beacon placement. LNP were administered at doses of 0.5 mg/kg, 1.5 mg/kg, 3 mg/kg, and 5 mg/kg. AAV was administered at 1E11, 3E11, or 1E12 viral genomes (vg) per animal. LNP #F1=LNP formulation #1. LNP #F2=LNP formulation #F2. LNP #F3=LNP formulation #F3.

[0121] FIG. 19 show percent in vivo integration of a template polynucleotide in AttP mice following delivering of the Bxb1 using adenovirus (AdV) and the template polynucleotide using an AAV (“AAV Cargo”). Bxb1 Adv was administered to the mice at a dose of either 3E10 or 1E11 vector genomes (vg) per animal. AAV Cargo was administered to the mice at a dose of 1E12.

[0122] FIG. 20A shows ddPCR data for percent in vivo beacon placement in the Nolc1 locus of neonatal mice at eight days post-delivery of a single dose of a mixture of two LNPs. First LNP contained mRNA encoding a prime editing system and a first synthetic atgRNA (atgRNA1) at a 1:1 ratio. Second LNP contained mRNA encoding a prime editing system and a second synthetic atgRNA (atgRNA2) at a 1:1 ratio. Each of the first and second atgRNAs targeted the mouse Nolc1 locus, encoded a portion of an integration recognition site (“beacon”), and together included a 6 bp overlap. The first and second LNPs were combined 1:1 as mixture and administered at either 1 mg/kg or 3 mg/kg. LNP #F2=LNP formulation #F2.

[0123] FIG. 20B show NGS data for percent in vivo beacon placement in the Nolc1 locus of the same neonatal mice and treatment conditions as described in FIG. 20A. NGS data shows beacon placement eight days after administration of the LNP mixture. LNP #F2=LNP formulation #F2.

[0124] FIG. 20C shows NGS data for percentage of in vivo beacons placed in the Nolc1 NGS data is for the same mice with the same treatment conditions as described in FIG. 20A. NGS data shows data for eight days after administration of the LNP mixture. LNP #F2=LNP formulation #F2.

[0125] FIG. 21A shows ddPCR data for percent in vivo beacon placement in the Nolc1 locus of neonatal mice at 6 weeks post-delivery of a single dose of a mixture of two LNPs. First LNP contained mRNA encoding a prime editing system and a first synthetic atgRNA (atgRNA1) at a 1:1 ratio. Second LNP contained mRNA encoding a prime editing system and a second synthetic atgRNA (atgRNA2) at a 1:1 ratio. Each of the first and second atgRNAs targeted the mouse Nolc1 locus, encoded a portion of an integration recognition site (“beacon”), and together included a 6 bp overlap. The first and second LNPs were combined 1:1 as mixture and administered at either 1 mg/kg or 3 mg/kg. LNP #F2=LNP formulation #F2.

[0126] FIG. 21B shows NGS data for percent in vivo beacon placement in the Nolc1 locus of the same neonatal mice and treatment conditions as described in FIG. 21A. NGS data shows beacon placement 6 weeks after administration of the LNP mixture. LNP #F2=LNP formulation #F2.

[0127] FIG. 21C shows NGS data for percentage of in vivo beacons placed in the Nolc1 locus that included the expected integration recognition site. Data is from the same mice with the same treatment conditions as described in FIG. 22A. NGS data shows data at 6 weeks after administration of the LNP mixture. LNP #F2=LNP formulation #F2.

[0128] FIG. 22A shows ddPCR data for percent in vivo beacon placement in the Factor IX (“mF9”) locus of 6-8 week old mice at day 8 post-delivery of a single dose of a mixture of two LNPs. First LNP contained mRNA encoding a prime editing system and a first synthetic atgRNA (atgRNA1) at a ratio of 1:0.5, 1:1, or 1:2. Second LNP contained mRNA encoding a prime editing system and a second synthetic atgRNA (atgRNA2) at a ratio of 1:1, 1:0.5, or 1:2. Each of the first and second atgRNAs targeted the mouse Factor IX locus, encoded a portion of an integration recognition site (“beacon”), and together included a 6 bp overlap. The first and second LNPs were combined 1:1 as mixture with the final ratio of mRNA:atgRNA1:atgRNA2 at 1:0.25:0.25; 1:0.5:0.5, or 1:1:1. LNP #F2=LNP formulation #F2.

[0129] FIG. 22B shows NGS data for percent in vivo beacon placement in the mF9 locus of the same neonatal mice and treatment conditions as described in FIG. 22A. NGS data shows beacon placement 8 days after administration of the LNP mixture. LNP #F2=LNP formulation #F2.

[0130] FIG. 22C shows NGS data for percent of in vivo beacons placed in the mF9 locus that included the expected integration recognition site. Data is from the same mice with the same treatment conditions as described in FIG. 22A. NGS data shows data at 8 days after administration of the LNP mixture. LNP #F2=LNP formulation #F2.

[0131] FIG. 23 shows schematics for non-limiting examples of engineered integrases. Abbreviations: 5′ UTR=5′ untranslated region; XBG=Xenopus beta globin; NLS=nuclear localization signal; BxB1=BxB1 integration enzyme; HA=HA Tag; HiBit=tag; 3′ UTR=3′ untranslated region; 80A's=poly A tail comprising 80 adenines (SEQ ID NO: 721). L275V indicates a L to V substitution at position 275 of BxB1 (SEQ ID NO: 388).

[0132] FIGS. 24A-24C show PGI data for the engineered integration enzymes described in FIG. 23. FIG. 24A shows ddPCR data for beacon placement. FIG. 24B shows ddPCR for integration %. FIG. 24C shows ddPCR data for beacon occupancy %.

[0133] FIG. 25 shows schematics for non-limiting examples of engineered integrases having a codon optimized coding sequence for BxB1 and a split polyA. 5′ UTR=5′ untranslated region; XBG=Xenopus beta globin; NLS=nuclear localization signal; BxB1=BxB1 integration enzyme; HA=HA Tag; HiBit=tag; 3′ UTR=3′ untranslated region; 30-70 pA's=polyA tail comprising 30-70 adenines (SEQ ID NO: 722). 80A's=poly A tail comprising 80 adenines (SEQ ID NO: 721).

[0134] FIG. 26 shows % Occupancy (an indicator of PGI) in cells treated with the indicated engineered BxB1 integration enzymes (e.g., as described in FIG. 25) at high dose (1.3 pmol) or low does (0.2 pmol).

[0135] FIGS. 27A-27D show % Beacon Occupancy (an indicator of PGI) in cells treated with mRNA encoding the indicated engineered BxB1 integration enzymes: PL760 (FIG. 27A), PL1303 (FIG. 27B), PL1304 (FIG. 27C), and PL1305 (FIG. 27D). mRNA was introduced at 1000 ng, 500 ng, 250 ng, and 0 ng (control).

[0136] FIG. 28 shows schematics for non-limiting examples of engineered integrases. 5′ UTR=5′ untranslated region; XBG=Xenopus beta globin; NLS=nuclear localization signal; BxB1=BxB1 integration enzyme; HA=HA Tag; HiBit=tag; 3′ UTR=3′ untranslated region; 80A's=poly A tail comprising 80 adenines (SEQ ID NO: 721); Strep=streptavidin tag; Stabilion=stabilion peptide; and Sumo=sumo peptide.

[0137] FIG. 29A shows PGI % in primary human hepatocytes (PHH) transfected with 250 ng of the indicated mRNAs: PL1303; PL1325: PL1326; PL1327; and PL1305 as well as controls Beacon only, nCas9-RT only and untreated cells.

[0138] FIG. 29B shows Beacon Occupancy % (an indicator of PGI) in primary human hepatocytes (PHH) transfected with 250 ng of the indicated mRNAs: PL1303; PL1325; PL1326; PL1327; and PL1305 as well as controls Beacon only, nCas9-RT only and untreated cells.

[0139] FIG. 29C shows PGI % in primary human hepatocytes (PHH) transfected with the indicated mRNAs: PL1303; PL1305; and PL1325 as well as controls Beacon only, nCas9-RT only and untreated cells.

[0140] FIG. 29D shows Beacon Occupancy % (an indicator of PGI) in primary human hepatocytes (PHH) transfected with the indicated mRNAs: PL1303; PL1305; and PL1325 as well as controls Beacon only, nCas9-RT only and untreated cells.

[0141] FIG. 30A shows a non-limiting workflow for using the engineered integration enzymes for programmable gene insertion, for example, in a pluripotent stem cell.

[0142] FIG. 30B shows schematics for non-limiting examples of engineered integrases. 5′ UTR=5′ untranslated region; XBG=Xenopus beta globin; NLS=nuclear localization signal; BxB1=BxB1 integration enzyme; HA=HA Tag; HiBit=tag; 3′ UTR=3′ untranslated region; 80A's=poly A tail comprising 80 adenines (SEQ ID NO: 721); Stabilion=stabilion peptide.

[0143] FIG. 30C shows cell viability data in iPSCs (clones 52 and 17) at day 3 after transduction for each of the conditions indicated on the x-axis.

[0144] FIG. 30D shows ddPCR data for percent (%) PGI in iPSC (clones 52 and 17) at day 3 after transduction for each of the conditions indicated on the x-axis.

[0145] FIG. 31A shows ddPCR data for percent (%) PGI at day 3 and day 6 for iPSC clone 52 for each of the conditions indicated on the x-axis.

[0146] FIG. 31B shows flow cytometry plots of side-scatter versus FITC-A for each of the indicated conditions. FITC-A is an indicator PGI.

[0147] FIG. 32A shows a schematic of non-limiting examples of engineered BxB1 integrases assessed for their ability to mediate PGI in hematopoietic stem cells (HSCs).

[0148] FIG. 32B shows ddPCR data for percent (%) PGI in HSCs for each of the conditions indicated on the x-axis (see engineered BxB1 integrases described in FIG. 32A).

[0149] FIG. 33 shows a schematic of non-limiting examples of engineered BxB1 integrases.

[0150] FIG. 34 shows ddPCR data for % Beacon Occupancy (an indicator of PGI) for each of the conditions indicated on the x-axis.

[0151] FIG. 35 shows a schematic of engineered BxB1 integrases selected for further study.

[0152] FIG. 36A shows a schematic of a BxB1 integrase with identification of the location of two predicted degron motifs as well as the location of lysine that are candidates for lysine to arginine amino acid substitutions.

[0153] FIG. 36B shows protein expression data in the form of a western blot comparing a BxB1 having a lysine at position 10 substituted for an arginine (K10R) (left panel) versus a BxB1 having a lysine at position 10 (right panel). Samples were collected at 24 and 48 hours.

[0154] FIGS. 37A-37B show first attempts at optimizing BxB1 RNA structure using the LinearDesign algorithm. Non-optimized mRNA encoding BxB1 in shown in FIG. 37A with optimized mRNA encoding BxB1 shown in FIG. 37B.

[0155] FIGS. 38A-38B show first generations attempts at optimizing an RNA structure for RNA encoding nCas9-RT using the LinearDesign algorithm. Non-optimized mRNA encoding nCas9-RT in shown in FIG. 38A with optimized mRNA encoding nCsa9-RT shown in FIG. 38B.

[0156] FIG. 39 ddPCR data for Beacon placement for the nCas9-RT described in FIG. 38A and FIG. 38B.

[0157] FIG. 40 shows non-limiting examples of fusion proteins comprising an nCas9-RT are fused with engineered integration enzymes (e.g., BxBT). 5′ UTR=5′ untranslated region; XBG=Xenopus beta globin; NLS=nuclear localization signal; BxBT=BxBT integration enzyme; HA=HA Tag; HiBit=tag; 3′ UTR=3′ untranslated region; 80A's=poly A tail comprising 80 adenines (SEQ ID NO: 721); and Stabilion=stabilion peptide.

[0158] FIG. 41 shows non-limiting examples of fusion proteins. Fusion proteins comprising a nCas9 and RT are fused with engineered integration enzymes (e.g., BxBT). 5′ UTR=5′ untranslated region; XBG=Xenopus beta globin; NLS=nuclear localization signal; BxB1=BxB1 integration enzyme; HA=HA Tag; HiBit=tag; 3′ UTR=3′ untranslated region; 80A's=poly A tail comprising 80 adenines (SEQ ID NO: 721); and Stabilion=stabilion peptide.

[0159] FIG. 42 shows schematics for non-limiting examples of engineered integrases. 5′ UTR=5′ untranslated region; XBG=Xenopus beta globin; NLS=nuclear localization signal; BxB1=BxB1 integration enzyme; HA=HA Tag; HiBit=tag; 3′ UTR=3′ untranslated region; 80A's=poly A tail comprising 80 adenines (SEQ ID NO: 721); Stabilion=stabilion peptide

[0160] FIG. 43 shows ddPCR data for percent (%) PGI in iPSC (clones 52) at day 3 after transduction for each of the conditions indicated on the x-axis.

[0161] FIG. 44A shows ddPCR data and flow cytometry data for percent (%) PGI at day 7 for iPSC clone 52 for each of the conditions indicated on the x-axis.

[0162] FIG. 44B shows flow cytometry plots of side-scatter versus FITC-A for each of the indicated conditions. FITC-A is an indicator PGI.

[0163] FIG. 45 shows ddPCR data for percent (%) PGI in iPSC (clones 52) at day 3 after transduction for each of the conditions indicated on the x-axis.

[0164] FIG. 46 shows schematics for non-limiting examples of engineered integrases fused to gene editor polypeptides. 5′ UTR=5′ untranslated region; XBG=Xenopus beta globin; NLS=nuclear localization signal; BxB1=BxB1 integration enzyme; HA=HA Tag; HiBit=tag; 3′ UTR=3′ untranslated region; 80A's=poly A tail comprising 80 adenines (SEQ ID NO: 721); Stabilion=stabilion peptide.

[0165] FIG. 47 shows ddPCR data for percent beacon placement in primary human hepatocyte (PHH line HU8412) at day 4 after transduction for each of the conditions indicated on the x-axis. Two different concentrations for each construct were used: 187 fmol and 374 fmol.

[0166] FIG. 48 shows ddPCR data for percent beacon placement in primary human hepatocyte (PHH line HU8412) at day 4 after transduction for each of the conditions indicated on the x-axis. PL883 was used as a control with ddPCR data presented in middle panel. Right panel includes a table converting mass (ng) to fmol for the BxB1 mRNA used in these transfections.

[0167] FIG. 49 shows ddPCR data for integration data in primary human hepatocyte (PHH line HU8412) at day 4 after transduction for each of the conditions indicated on the x-axis.

[0168] FIG. 50 shows ddPCR data for total edit (AttB+AttL) in primary human hepatocyte (PHH line HU8412) at day 4 after transduction for each of the conditions indicated on the x-axis.

[0169] FIG. 51 shows ddPCR data for total edit (AttB+AttL) in primary human hepatocyte (PHH line HU8412) at day 4 after transduction for each of the conditions indicated on the x-axis.

[0170] FIG. 52 shows ddPCR data for percent beacon placement in primary human hepatocyte (PHH line HU8412) at day 4 after transduction for each of the conditions indicated on the x-axis.

[0171] FIG. 53 shows ddPCR data for integration data, total edit (AttB+AttL), and beacon placement in primary human hepatocyte (PHH line HU8412) at day 4 after transduction for each of the conditions indicated on the x-axis. Two different concentrations for each construct were used: 187 fmol and 210 fmol.

[0172] FIG. 54A shows a schematic drawing (not to scale) for a working model of Integrase function. Integrase dimers bind to attP and attB and associate the sites to form the complex shown on the left. Site-specific recombination catalyzed by the N-terminal catalytic domains (NTDs) results in the hybrid sites attL and attR (right). The reverse reaction that converts attL and attR to attP and attB does not occur at a measurable rate in the absence of a phage encoded RDF protein. attPL and attPR refer to the left and right half-sites of attP.

[0173] FIG. 54B shows domain structure of the Bxb1 LSR, with the amino acid residues demarcating the boundaries of the different domains/motifs indicated. NTD: N-terminal catalytic domain. αE is an alpha helix that extends from the NTD to the recombinase domain (RD). CC: coiled-coil motif embedded in the zinc ribbon domain (ZD).

[0174] FIG. 55 shows that certain mutations in the zinc ribbon domain (ZD) maintain activity while improving specificity. The top panel shows that some of the 22 mutations at residues 315-320 of Bxb1 LSR have substantially the same or even higher on-target (on-beacon) integration activity in HEK293 cells compared to that of wild-type Bxb1 LSR, with the horizontal dashed line shows 100% of the relative on-target activity of Bxb1 LSR. The bottom panel shows that all tested mutations have substantially less, or nearly undetectable off-target (off-beacon) integration activity compared to that of wild-type Bxb1 LSR, with the horizontal dashed line shows 100% of the relative off-target activity of Bxb1 LSR. Mutations having substantially the same on-target integration as wt Bxb1 and substantially less (e.g., undetectable) off-target integration compared to wt-Bxb1 (such as the K320E mutation) have higher specificity/fidelity than wt Bxb1 in terms of on-target integration.

[0175] FIG. 56 shows similar results as in FIG. 55, in Primary Human Hepatocytes (PHH).

[0176] FIG. 57 shows that the K320E mutation increases LSR affinity for on-beacon sites and reduces LSR affinity for off-beacon sites. The data shows that the K320E mutation increased on-beacon affinity by ˜2-fold, and decreased off-beacon affinity by ˜2-5-fold.

[0177] FIG. 58 shows the results of scaled off-target evaluation of 8 engineered LSRs. All eLSRs display reduced frequency and scope of off-target edits at 100 top off-target sites. All such so-called HiFi variants eLSRs have improved off target % vs wild type Bxb1 integrase. Decrease in off-target integration is predominantly cryptic site sequence-independent.

[0178] FIG. 59 shows sequence alignments of attB sequences for several off-target integration recognition sequences used by Bxb1. Conserved nucleotides are highlighted. Putative contacting nucleotides with the various LSR domains (ZD and RD) are marked as horizontal bars.

[0179] FIGS. 60A-60E. Bxb1 binding and activity assays. FIG. 60A is a schematic diagram illustrating the Bxb1 protein has three distinct domains, a N-terminal Domain (NTD) which is responsible for both dimerization and catalysis, a Recombinase Domain (RD) and a Zinc Ribbon Domain (ZD) which contains an extended coiled-coil motif (CC). In solution Bxb1 forms a dimer which binds DNA on either side of a central dinucleotide of either and attB or attP recognition sequence. The CC domains of the attB and attP bound forms interact in the tetramer conformation where a catalytic serine residue cleaves the phosphate backbone of the DNA and forms a covalent bond. Strand exchange then occurs by rotation of the dimers around a planar interface forming two new stable-bound dimers bound to the attL and attR recognition motifs. Finally DNA ligation and dissociation leave an intact double-stranded DNA. FIG. 60B is a schematic diagram illustrating the Bxb1 DNA binding Gel shift assay with the lower band corresponding to unbound and the upper band to bound with a slow migrating species visible in the two highest concentration lanes (left). Curves showing the quantified fraction of Bxb1 bound to DNA as a function of the concentration of enzyme. n=2 error bars are standard deviation (right). FIG. 60C is a schematic diagram illustrating dissociation constants calculated from gel-shift binding assays with error bars representing the 95% confidence interval. FIG. 60D is a schematic diagram illustrating the Bxb1 activity assay. Activity was measured by using DNA substrates containing either attB or attP with the attachment site placed close to 3′ or 5′ end respectively. Prior to recombination the DNA fragments were 180 bp (attB) or 220 bp (attP) and upon recombination form 286 bp (attL) 115 bp (attR), size differences can be seen on the TapeStation gel image (left) and used to calculate a specific activity (right). Error bars represent the standard deviation of n=2 measurements. FIG. 60E is a schematic diagram illustrating specific activity measurements for Bxb1 against DNA substrates containing truncated attachment sites. For each substrate the total length of the fragment was maintained by changing the attachment sequence with A<->C and G<->T. Error bars represent the standard deviation of n=2 measurements.

[0180] FIGS. 61A-61E. In vitro activity of WT Bxb1 and zinc ribbon mutants of Bxb1. FIG. 61A is a schematic diagram illustrating the WT attachment site (attB) for Bxb1 (SEQ ID NO: 410). The central dinucleotide is underlined, the recombinase binding region is indicated by a blue bar and the zinc ribbon binding region is indicated by pink bars. FIG. 61B is a schematic diagram illustrating a close up on a mode of the zinc ribbon loop of Bxb1 that has been subject to mutation based on the structure of the LI integrase, positions A315 and K320 are indicated. FIG. 61C is a schematic diagram illustrating the in vitro experiment: Bxb1 (or Bxb1 mutants) are delivered as mRNA, insertion cargo as DNA into HEK293FT cells with a preplaced attB attachment site. FIG. 61D is a schematic diagram illustrating Onbeacon integration activity of the 22 zinc ribbon mutants as measured by ddPCR. FIG. 61E is a schematic diagram illustrating Offbeacon integration activity of the 22 zinc ribbon mutants as measured by ddPCR at CAS031.

[0181] FIGS. 62A-62C—In vitro activity of WT Bxb1 and zinc ribbon mutants of Bxb1. FIG. 62A is a schematic diagram illustrating dissociation constants for engineered Bxb1 variants against its native substrates. FIG. 62B is a schematic diagram illustrating dissociation constants for engineered Bxb1 variants against off-beacon substrates. Error bars represent the 95% confidence interval. FIG. 62C s a schematic diagram illustrating specific activity measurements for engineered Bxb1 variants using attB and attP containing substrates. Error bars represent the standard deviation of n=2 measurements. *Upper bounds undetermined for the A315R K320R KD for CAS031.

[0182] FIGS. 63A-63G Binding and activity measurements of engineered Bxb1 mutants. FIG. 63A is a schematic diagram illustrating a table of the frequency of a mutation at each amino acid position within Bxb1. FIG. 63B is a schematic diagram illustrating the location of the specific mutations within the 15 tested naturally occurring variants indicated by arrows and amino acid changes on the WT sequence of Bxb1 (SEQ ID NO: 739). The red arrows highlight the constellation of mutations in the zinc ribbon domain that were used to generate variants 12, 13, 14, and 15. FIG. 63C is a schematic diagram illustrating On-beacon integration activity of the 15 naturally occurring mutants as measured by ddPCR. Error bars represent the standard deviation of n=3 measurements. FIG. 63D is a schematic diagram illustrating Off-beacon integration activity of the 15 naturally occurring mutants as measured by ddPCR at CAS031. Error bars represent the standard deviation of n=3 measurements. FIG. 63E is a schematic diagram illustrating dissociation constants for Bxb1 variant 12 against attB and attP. Error bars represent the 95% confidence interval, n=2. FIG. 63F i s a schematic diagram illustrating dissociation constants for Bxb1 variant 12 against off-beacon substrates. Error bars represent the 95% confidence interval, n=2. FIG. 63G is a schematic diagram illustrating specific activity measurements for engineered Bxb1 variant 12 using attB and attP containing substrates. Error bars represent the standard deviation of n=2 measurements.

[0183] FIGS. 64A-64F Activity of variants of Bxb1. FIG. 64A is a schematic diagram illustrating the in vivo experiment: On day 0, AVV containing a DNA cargo is delivered via IV. On day 7, Bxb1 (or stabilized Bxb1) is delivered via LNP. On day 14, livers are harvested and genomic DNA is probed for on-beacon integration. FIG. 64B is a schematic diagram illustrating the amino acid sequences of the stabilized Bxb1 molecules. Different stability tags are indicated by variable shadings. FIG. 64C is a schematic diagram illustrating in vivo activity for original stabilized Bxb1 constructs. FIG. 64D is a schematic diagram illustrating in vivo activity for the final panel of stabilized Bxb1 constructs. FIG. 64E is a schematic diagram illustrating in vivo activity for Bxb1 constructs containing both A315R and stabilization tags. FIG. 64F is a schematic diagram illustrating fold increase of in vivo activity of Bxb1 constructs compared to Bxb1 WT-1.

[0184] FIG. 65A shows the size exclusion chromatography trace of Bxb1 2-500 showing its observed retention time co-elutes with a 158 kDa molecular weight standard. FIG. 65B show recombinase activity assay curves for minimal attB sequence determination with the WT attP sequence. Error bars represent standard deviation n=2.

[0185] FIG. 66A shows binding assay curves for Bxb1 (wild-type), for attB, attP, attL, attR, and CAS031 and CAS421 off-beacon sequences. Error bars represent standard deviation n=2. FIGS. 66B-66J show binding assay curves for Bxb1 variants, for attB, attP, CAS031, and CAS421 off-beacon sequences. Error bars represent standard deviation n=2.

[0186] FIGS. 67A-67J show recombinase activity assay curves for Bxb1 (wild-type) and Bxb1 variants, for attB and attP. Error bars represent standard deviation n=2.

### 6. DETAILED DESCRIPTION

[0187] The invention described herein is partly based on the discovery that potential off-target integration sites (sometimes referred to herein as “off-beacon sites”) are more conserved in the recombinase binding region than in the other domains such as the zinc ribbon domain (ZD). See FIG. 59. Thus, mutations in, for example, the zinc ribbon domain (ZD) of the Integrases (also used herein interchangeably with “engineered large serine integrase,” “eLSR,” or “integration enzyme”) could reduce off-beacon integration without significantly affecting on-target/on-beacon integration.

[0188] More specifically, invention described herein provides engineered LSRs having mutations (such as mutations in the zinc ribbon domain) that maintain integrase activity while improving specificity/fidelity of cargo/donor DNA integration at the intended target integration sites having “beacons,” while substantially reducing or eliminating off-target integration at unintended/undesirable non-target (off-beacon) genomic locations.

[0189] Therefore, described herein are integration enzymes (e.g., lareg serine integrase or LSR) engineered such that upon being introduced into a cell, the integration enzyme has enhanced fidelity/specificity for target sites having matching cognate integration recognition sites. The engineered large serine integrase (eLSR) comprises one or more substitutions that substantially maintain or enhance integration activity at a pair of cognate integration recognition sites, and substantially decrease off-target integration activity at a pair of off-target integration recognition sites, when compared to a corresponding large serine integrase without said one or more substitutions (cLSR). In certain embodiments, the one or more substitutions are in a zinc ribbon domain (ZD) of the cLSR.

[0190] In certain embodiments, the eLSR is engineered such that upon being introduced into a cell, it has increased stability (e.g., half-life) compared to a control cLSR not engineered to have increased stability. The increase in stability extends the capacity of the eLSR to mediate integration. For example, this disclosure features an eLSR engineered to include a stabilization domain on the N-terminus, which resulted in increased integration of a donor polynucleotide template into an integration recognition site (i.e., beacon) placed into a genome of a cell as compared to a corresponding or control integration enzyme not engineered to include the stabilization domain. In typical embodiments, the engineered integration enzyme (eLSR) includes a mutation that enhances fidelity of the integration enzyme or fragment thereof, optionally an at least first stabilization domain, and further optionally a nuclear localization signal. At least in some case, location (e.g., N-terminus or C-terminus) of the stabilization domain (when present) in the eLSR impacted the integration enzyme's ability to mediate integration.

### 6.1. Terminology

[0191] Unless defined otherwise, all technical and scientific terms used herein have the meaning commonly understood by a person skilled in the art to which this invention belongs. As used herein, the following terms have the meanings ascribed to them below.

[0192] “Gene editor” as used herein, is a protein that that can be used to perform gene editing, gene modification, gene insertion, gene deletion, or gene inversion. As used herein, the terms “gene editor polynucleotide” refers to polynucleotide sequence encoding the gene editor protein. Such an enzyme or enzyme fusion may contain DNA or RNA targetable nuclease protein (i.e., Cas protein, ADAR, or ADAT), wherein target specificity is mediated by a complexed nucleic acid (i.e., guide RNA). Such an enzyme or enzyme fusion may be a DNA/RNA targetable protein, wherein target specificity is mediated by internal, conjugated, fused, or linked amino acids, such as within TALENs, ZFNs, or meganucleases. The skilled person in the art would appreciate that the gene editor can demonstrate targeted nuclease activity, targeted binding with no nuclease activity, or targeted nickase activity (or cleavase activity). A gene editor comprising a targetable protein may be fused, linked, complexed, operate in cis or trans to one or more proteins or protein fragment motifs. Gene editors may be fused or linked to one or more integrase, recombinase, polymerase, telomerase, reverse transcriptase, or invertase. A gene editor can be a prime editor fusion protein or a gene writer fusion protein.

[0193] “Alpha editor fusion protein” or “Prime editor fusion protein” as used herein interchangeably, describes a protein that is used in prime editing (also used herein for “alpha editing”). “Alpha editor system” or “Prime editor system” as used interchangeably herein describes the components used in alpha editing/prime editing. Alpha editing/prime editing uses CRISPR enzyme that nicks or cuts only single strand of double stranded DNA, i.e., a nickase; the nickase can occur either naturally or by mutation or modification of a nuclease that makes double stranded cuts. The nickase is programmed (directed) with a prime-editing guide RNA (pegRNA). The skilled person in the art would appreciate that the pegRNA both specifies the target site and encodes the desired edit. Described herein are attachment site containing guide RNA (atgRNA) that both specifies the target and encodes for the desired integrase target recognition site. The nickase may be programmed (directed) with an atgRNA. Advantageously the nickase is a catalytically impaired Cas9 endonuclease, a Cas9 nickase, that is fused to the reverse transcriptase. During genetic editing, the Cas9 nickase part of the protein is guided to the DNA target site by the atgRNA (or pegRNA), whereby a nick or single stranded cut occurs. The reverse transcriptase domain then uses the atgRNA (or pegRNA) to template reverse transcription of the desired edit, directly polymerizing DNA onto the nicked target DNA strand. The edited DNA strand replaces the original DNA strand, creating a heteroduplex containing one edited strand and one unedited strand. Afterward, optionally, the prime editor (PE) guides resolution of the heteroduplex to favor copying the edit onto the unedited strand, completing the process (typically achieved with a nickase gRNA). Other enzymes that can be used to nick or cut only a single strand of double stranded DNA includes a cleavase (e.g., cleavase I enzyme).

[0194] In some embodiments, an additional agent or agents may be added that improve the efficiency and outcome purity of the prime edit. In some embodiments, the agent may be chemical or biological and disrupt DNA mismatch repair (MMR) processes at or near the edit site (i.e., PE4 and PE5 and PEmax architecture by Chen et al. Cell, 184, 1-18, Oct. 28, 2021; Chen et al. is incorporated herein by reference). In typical embodiments, the agent is a MMR-inhibiting protein. In certain embodiments, the MMR-inhibiting protein is dominant negative MMR protein. In certain embodiments, the dominant negative MMR protein is MLH1dn. In particular embodiments, the MMR-inhibiting agent is incorporated into the co-delivery method described herein. In some embodiments, the MMR-inhibiting agent is linked or fused to the prime editor protein fusion, which may or may not have a linked or fused integrase. In some embodiments, the MMR-inhibiting agent is linked or fused to the Gene Writer™ protein, which may or may not have a linked or fused integrase.

[0195] The prime editor or gene editor system can be used to achieve DNA deletion and replacement. In some embodiments, the DNA deletion replacement is induced using a pair of atgRNAs or pegRNA that target opposite DNA strands, programming not only the sites that are nicked but also the outcome of the repair (i.e., PrimeDel by Choi et al. Nat. Biotechnology, Oct. 14, 2021; Choi et al. is incorporated herein by reference and TwinPE by Anzalone et al. BioRxiv, Nov. 2, 2021; Anzalone et al. is incorporated herein by reference). In some embodiments described herein, the DNA deletion is induced using a single atgRNA. In some embodiments, the DNA deletion and replacement is induced using a wild type Cas9 prime editor (PE-Cas9) system (i.e., PEDAR by Jiang et al. Nat. Biotechnology, Oct. 14, 2021; Jiang et al. is incorporated herein by reference in its entirety). In some embodiments, the DNA replacement is an integrase target recognition site or recombinase target recognition site. In certain embodiments, the constructs and methods described herein may be utilized to incorporate the pair of pegRNAs (or atgRNAs) used in PrimeDel, TwinPE (WO2021226558 incorporated by reference herein in its entirety), or PEDAR, the prime editor fusion protein or Gene Writer protein, optionally a nickase guide RNA (ngRNA), an integrase, a nucleic acid cargo, and optionally a recombinase into a LNP delivery system or vector delivery system (e.g., AAV or Adenovirus). The integrase may be directly linked, for example by a peptide linker, to the prime editor fusion or gene writer protein.

[0196] In some embodiments, the prime editors can refer to a retrovirus or lentivirus reverse transcriptase such as a Moloney Murine Leukemia Virus (M-MLV) reverse transcriptase (RT) fused to a CRISPR enzyme nickase such as a Cas9 H840A nickase, a Cas9nickase. In some embodiments, the prime editors can refer to a retrovirus or lentivirus reverse transcriptase such as a Moloney Murine Leukemia Virus (M-MLV) reverse transcriptase (RT) fused to a cleavase. In some embodiments the RT can be fused at, near or to the C-terminus of a Cas9nickase, e.g., Cas9 H840A. Fusing the RT to the C-terminus region, e.g., to the C-terminus, of the Cas9 nickase may result in higher editing efficiency. Such a complex is called PEI. In some embodiments, the CRISPR enzyme nickase, e.g., Cas9(H840A), i.e., a Cas9nickase, can be linked to a non-M-MLV reverse transcriptase such as an AMV-RT or XRT (Cas9(H840A)-AMV-RT or XRT). In some embodiments, instead of the CRISPR enzyme nickase being a Cas9 (H840A), i.e., instead of being a Cas9 nickase, the CRISPR enzyme nickase instead can be a CRISPR enzyme that naturally is a nickase or cuts a single strand of double stranded DNA; for instance, the CRISPR enzyme nickase can be Cas12a/b. Alternatively, the CRISPR enzyme nickase can be another mutation of Cas9, such as Cas9(Dl0A). A CRISPR enzyme, such as a CRISPR enzyme nickase, such as Cas9 (wild type), Cas9(H840A), Cas9(Dl0A) or Cas 12a/b nickase can be fused in some embodiments to a pentamutant of M-MLV RT (D200N/L603W/T330P/T306K/W313F), whereby there can be up to about 45-fold higher efficiency, and this is called PE2. In some embodiments, the M-MLV RT comprise one or more of the mutations Y8H, P51L, S56A, S67R, E69K, V129P, L139P, T197A, H204R, V223H, T246E, N249D, E286R, Q2911, E302K, E302R, F309N, M320L, P330E, L435G, L435R, N454K, D524A, D524G, D524N, E562Q, D583N, H594Q, E607K, D653N, and L671P. Specific M-MLV RT mutations are shown in Table 1.

TABLE 1

| | | Forward Sequence |
|---|---|---|
| SEQ ID NO | Description | (5′-3′) |
| SEQ ID NO: 01 | RT mut L139P | ttgagcgggC |
| | | CCccaccgt |
| SEQ ID NO: 02 | RT mut E562Q | cagcgggctC |
| | | AGctgatagca |
| SEQ ID NO: 03 | RT mut D653N | cggatggctA |
| | | ACcaagcggcc |

[0197] In some embodiments, the reverse transcriptase can also be a wild-type or modified transcription xenopolymerase (RTX), avian myeloblastosis virus reverse transcriptase (AMV RT), Feline Immunodeficiency Virus reverse transcriptase (FIV-RT), FeLV-RT (Feline leukemia virus reverse transcriptase), HIV-RT (Human Immunodeficiency Virus reverse transcriptase). In some embodiments, the reverse transcriptase can be a fusion of MMuLV to the Sto7d DNA binding domain (see lonnidi et al.; https://doi.org/10.1101/2021.11.01.466786). The fusion of MMuLV to the Sto7d DNA binding domain sequence is given in Table 2.

TABLE 2

| | | SEQ |
|---|---|---|
| | | ID |
| Description | Forward Sequence (5′-3′) | NO: |
| RT(1- | atgactcactatcaggccttgct | 4 |
| 478)_ | tttggacacggaccgggtccag | |
| Sto7d | ttcggaccggtggtagccctga | |
| fusion | acccggctacgctgctcccact | |
| [MMulv | gcctgaggaagggctgcaacac | |
| sequence | aactgccttgatGGGACAGGTG | |
| (in | GCGGTGGTGTCACCGTCAAGTT | |
| bold), | CAAGTACAAGGGTGAGGAACTT | |
| Sto7d | GAAGTTGATATTAGCAAAATCA | |
| sequence] | AGAAGGTTTGGCGCGTTGGTAA | |
| | AATGATATCTTTTACTTATGAC | |
| | GACAACGGCAAGACAGGTAGAG | |
| | GGGCAGTGTCTGAGAAAGACGC | |
| | CCCCAAGGAGCTGTTGCAAATG | |
| | TTGGAAAAGTCTGGGAAAAAGt | |
| | ctggcggctcaaaaagaaccgc | |
| | cgacggcagegaattcgagccc | |
| | aagaagaagaggaaagtc | |

[0198] PE3, PE3b, PE4, PE5, and/or PEmax, which a skilled person can incorporate into the co-delivery system described herein, involves nicking the non-edited strand, potentially causing the cell to remake that strand using the edited strand as the template to induce HR. The nicking of the non-edited strand can involve the use of a nicking guide RNA (ngRNA).

[0199] The skilled person can readily incorporate into the co-delivery system described herein described herein a prime editing or CRISPR system. Examples of prime editors can be found in the following: WO2020/191153, WO2020/191171, WO2020/191233, WO2020/191234, WO2020/191239, WO2020/191241, WO2020/191242, WO2020/191243, WO2020/191245, WO2020/191246, WO2020/191248, WO2020/191249, each of which is incorporated by reference herein in its entirety. In addition, mention is made, and can be used herein, of CRISPR Patent Applications and Patents of the Zhang laboratory and/or Broad Institute, Inc. and Massachusetts Institute of Technology and/or Broad Institute, Inc., Massachusetts Institute of Technology and President and Fellows of Harvard College and/or Editas Medicine, Inc. Broad Institute, Inc., The University of Iowa Research Foundation and Massachusetts Institute of Technology, including those claiming priority to U.S. Application 61/736,527, filed Dec. 12, 2012, including U.S. Pat. Nos. 11,104,937, 11,091,798, 11,060,115, 11,041,173, 11,021,740, 11,008,588, 11,001,829, 10,968,257, 10,954,514, 10,946,108, 10,930,367, 10,876,100, 10,851,357, 10,781,444, 10,711,285, 10,689,691, 10,648,020, 10,640,788, 10,577,630, 10,550,372, 10,494,621, 10,377,998, 10,266,887, 10,266,886, 10,190,137, 9,840,713, 9,822,372, 9,790,490, 8,999,641, 8,993,233, 8,945,839, 8,932,814, 8,906,616, 8,895,308, 8,889,418, 8,889,356, 8,871,445, 8,865,406, 8,795,965, 8,771,945, and 8,697,359; CRISPR Patent Applications and Patents of the Doudna laboratory and/or of Regents of the University of California, the University of Vienna and Emmanuelle Charpentier, including those claiming priority to U.S. application 61/652,086, filed May 25, 2012, and/or 61/716,256, filed Oct. 19, 2012, and/or 61/757,640, filed Jan. 28, 2013, and/or 61/765,576, filed Feb. 15, 2013 and/or 13/842,859, including U.S. Pat. Nos. 11,028,412, 11,008,590, 11,008,589, 11,001,863, 10,988,782, 10,988,780, 10,982,231, 10,982,230, 10,900,054, 10,793,878, 10,774,344, 10,752,920, 10,676,759, 10,669,560, 10,640,791, 10,626,419, 10,612,045, 10,597,680, 10,577,631, 10,570,419, 10,563,227, 10,550,407, 10,533,190, 10,526,619, 10,519,467, 10,513,712, 10,487,341, 10,443,076, 10,428,352, 10,421,980, 10,415,061, 10,407,697, 10,400,253, 10,385,360, 10,358,659, 10,358,658, 10,351,878, 10,337,029, 10,308,961, 10,301,651, 10,266,850, 10,227,611, 10,113,167, and 10,000,772; CRISPR Patent Applications and Patents of Vilnius University and/or the Siksnys laboratory, including those claiming priority to U.S. application 62/046,384 and/or 61/625,420 and/or 61/613,373 and/or PCT/IB2015/056756, including U.S. Pat. No. 10,385,336; CRISPR Patent Applications and Patents of the President and Fellows of Harvard College, including those of George Church's laboratory and/or claiming priority to U.S. application 61/738,355, filed Dec. 17, 2012, including 11,111,521, 11,085,072, 11,064,684, 10,959,413, 10,925,263, 10,851,369, 10,787,684, 10,767,194, 10,717,990, 10,683,490, 10,640,789, 10,563,225, 10,435,708, 10,435,679, 10,375,938, 10,329,587, 10,273,501, 10,100,291, 9,970,024, 9,914,939, 9,777,262, 9,587,252, 9,267,135, 9,260,723, 9,074,199, 9,023,649; CRISPR Patent Applications and Patents of the President and Fellows of Harvard College, including those of David Liu's laboratory, including 11,111,472, 11,104,967, 11,078,469, 11,071,790, 11,053,481, 11,046,948, 10,954,548, 10,947,530, 10,912,833, 10,858,639, 10,745,677, 10,704,062, 10,682,410, 10,612,011, 10,597,679, 10,508,298, 10,465,176, 10,323,236, 10,227,581, 10,167,457, 10,113,163, 10,077,453, 9,999,671, 9,840,699, 9,737,604, 9,526,784, 9,388,430, 9,359,599, 9,340,800, 9,340,799, 9,322,037, 9,322,006, 9,228,207, 9,163,284, and 9,068,179; and CRISPR Patent Applications and Patents of Toolgen Incorporated and/or the Kim laboratory and/or claiming priority to U.S. application 61/717,324, filed Oct. 23, 2012 and/or 61/803,599, filed Mar. 20, 2013 and/or 61/837,481, filed Jun. 20, 2013 and/or 62/033,852, filed Aug. 6, 2014 and/or PCT/KR2013/009488 and/or PCT/KR2015/008269, including U.S. Pat. Nos. 10,851,380, and 10,519,454; and CRISPR Patent Applications and Patents of Sigma and/or Millipore and/or the Chen laboratory and/or claiming priority to U.S. application 61/734,256, filed Dec. 6, 2012 and/or 61/758,624, filed Jan. 30, 2013 and/or 61/761,046, filed Feb. 5, 2013 and/or 61/794,422, filed Mar. 15, 2013, including U.S. Pat. No. 10,731,181, each of which is hereby incorporated herein by reference, and from the disclosures of the foregoing, the skilled person can readily make and use a prime editing or CRISPR system, and can especially appreciate impaired endonucleases, such as a mutated Cas9 that only nicks a single strand of DNA and is hence a nickase, or a CRISPR enzyme that only makes a single-stranded cut that can be employed in a PASTE system of the invention. Further, from the disclosures of the foregoing, the skilled person can incorporate the selected CRISPR enzyme, as part of the prime editor fusion or gene editor fusion, into the co-delivery method described herein.

[0200] Prior to RT-mediated edit incorporation, the prime editor protein (or system) (1) site-specifically targets a genomic locus and (2) performs a catalytic cut or nick. These steps are typically performed by a CRISPR-Cas. However, in some embodiments the Cas protein may be substituted by other nucleic acid programmable DNA binding proteins (napDNAbp) such as zinc finger nucleases (ZFNs), transcription activator-like effector nucleases (TALENs), or meganucleases. In addition, to the extent the “targeting rules” of other napDNAbp are known or are newly determined, it becomes possible to use new napDNAbp, beyond Cas9, to site specifically target and modify genomic sites of interest.

[0201] Similar to a prime editor protein, a Gene Writer can introduce novel DNA elements, such as an integration target site, into a DNA locus. A Gene Writer protein comprises: (A) a polypeptide or a nucleic acid encoding a polypeptide, wherein the polypeptide comprises (i) a reverse transcriptase domain, and either (x) an endonuclease domain that contains DNA binding functionality or (y) an endonuclease domain and separate DNA binding domain; and (B) a template RNA comprising (i) a sequence that binds the polypeptide and (ii) a heterologous insert sequence. Examples of such Gene Writer™ proteins and related systems can be found in US20200109398, which is incorporated by reference herein in its entirety.

[0202] In some embodiments, the prime editor or Gene Writer protein fusion or prime editor protein linked or fused to an integrase is expressed as a split construct. In typical embodiments, the split construct in reconstituted in a cell. In some embodiments, the split construct can be fused or ligated via intein protein splicing. In some embodiments, the split construct can be reconstituted via protein-protein inter-molecular bonding and/or interactions. In some embodiments, the split construct can be reconstituted via chemical, biological, or environmental induced oligomerization. In certain embodiments, the split construct can be adapted into one or more delivery vectors described herein.

[0203] In some embodiments, an integrase or recombinase is directly linked or fused, for example by a peptide linker, which may be cleavable or non-cleavable, to the prime editor fusion protein (i.e., fused Cas9 nickase-reverse transcriptase) or Gene Writer protein. Suitable linkers, for example between the Cas9, RT, and integrase, may be selected from Table 3:

TABLE 3

| | | SEQ ID | | SEQ ID |
|---|---|---|---|---|
| | Sequence (5′-3′) | NO: | Amino acid sequence | NO: |
| A - P2A | GGAAGCGGAGCTACTAACTTCAGCCT | 15 | GSGATNFSLLKQAGDVE | 13 |
| | GCTGAAGCAGGCTGGCGACGTGGAG | | ENPGP | |
| | GAGAACCCTGGACCT | | | |
| B - | GGGGGAGGAGGTTCTGGAGGCGGAG | 6 | GGGGSGGGGSGGGGS | 14 |
| (GGGS)3 | GCTCCGGAGGCGGAGGGTCA | | | |
| (SEQ ID | | | | |
| NO: 678) | | | | |
| C - | GGAGGTGGCGGGAGC | 7 | GGGGS | 15 |
| GGGGS | | | | |
| (SEQ ID | | | | |
| NO: 15) | | | | |
| D - PAPAP | CCCGCACCAGCGCCT | 8 | PAPAP | 16 |
| (SEQ ID | | | | |
| No: 16) | | | | |
| E - | GAGGCAGCTGCCAAGGAAGCCGCTG | | EAAAKEAAAKEAAAK | 17 |
| (EAAAK)3 | CCAAGGAGGCGGCCGCAAAG | | | |
| (SEQ ID | | | | |
| NO: 17) | | | | |
| F - XTEN | AGTGGGAGCGAGACCCCTGGGACTA | 10 | SGSETPGTSESATPES | 18 |
| | GCGAGTCAGCTACACCCGAAAGC | | | |
| G - (GGS)6 | GGGGGGTCAGGTGGATCCGGCGGAA | 11 | GGSGGSGGSGGSGGSG | 19 |
| (SEQ ID | GTGGCGGATCCGGTGGATCTGGCGG | | GS | |
| NO: 19) | CAGT | | | |
| H - EAAAK | GAAGCTGCTGCTAAG | 12 | EAAAK | 20 |
| (SEQ ID | | | | |
| NO: 20) | | | | |
| (GGGGS)4( | GGCGGCGGCGGCAGCGGCGGCGGC | 543 | GGGGSGGGGSGGGGS | 551 |
| SEQ ID NO: | GGCAGCGGCGGCGGCGGCAGCGGC | | GGGGS | |
| 551) | GGCGGCGGCAGC | | | |
| PAS8 | GGCGGCGCGAGCCCGGCGGGCGGC | 544 | GGASPAGG | 552 |
| PAS12 | GGCGGCGCGAGCCCGGCGGCGCCG | 545 | GGASPAAPAPAG | 553 |
| | GCGCCGGCGGGC | | | |
| A(EAAK)4A | GCGGAAGCGGCGAAAGAAGCGGCGA | 546 | AEAAKEAAKEAAKEAAKA | 554 |
| LEA(EAAA | AAGAAGCGGCGAAAGAAGCGGCGAA | | LEAEAAAKEAAAKEAAAK | |
| K)4A (SEQ | AGCGCTGGAAGCGGAAGCGGCGGCG | | EAAAKA | |
| ID NO: 554) | AAAGAAGCGGCGGCGAAAGAAGCGG | | | |
| | CGGCGAAAGAAGCGGCGGCGAAAGC | | | |
| | G | | | |
| Camel | GCGCATCATAGCGAAGATCCGGGCG | 547 | AHHSEDPGGGGSGGGG | 555 |
| | GCGGCGGCAGCGGCGGCGGCGGCA | | SGGGGS | |
| | GCGGCGGCGGCGGCAGC | | | |
| FRF | GGCGGCGGCGGCAGCGAAGCGGCG | 548 | GGGGSEAAAKGGGGS | 556 |
| | GCGAAAGGCGGCGGCGGCAGC | | | |
| RFF | GAAGCGGCGGCGAAAGGCGGCGGC | 549 | EAAAKGGGGSEAAAK | 557 |
| | GGCAGCGAAGCGGCGGCGAAA | | | |
| Modified | AGCGGCGGCAGCAGCGGCGGCAGCA | 550 | SGGSSGGSSGSETPGTS | 558 |
| XTEN | GCGGCAGCGAAACCCCGGGCACCAG | | ESATPESSGGSSGGSST | |
| (mXTEN) | CGAAAGCGCGACCCCGGAAAGCAGC | | | |
| | GGCGGCAGCAGCGGCGGCAGCAGCA | | | |
| | CC | | | |

[0204] In some embodiments, the prime editor or Gene Writer protein fusion or prime editor protein linked or fused to an integrase is expressed as a split construct. In typical embodiments, the split construct in reconstituted in a cell. In some embodiments, the split construct can be fused or ligated via intein protein splicing. In some embodiments, the split construct can be reconstituted via protein-protein inter-molecular bonding and/or interactions. In some embodiments, the split construct can be reconstituted via chemical, biological, or environmental induced oligomerization. In certain embodiments, the split construct can be adapted into one or more nucleic acid constructs described herein.

### 6.2. Type II CRISPR Proteins

[0205] The skilled person can incorporate a selected CRISPR enzyme, described below, as part of the prime editor fusion, into the co-delivery method described herein. Streptococcus pyogenes Cas9 (SpCas9), the most common enzyme used in genome-editing applications, is a large nuclease of 1368 amino acid residues. Advantages of SpCas9 include its short, 5′-NGG-3′ PAM and very high average editing efficiency. SpCas9 consists of two lobes: a recognition (REC) lobe and a nuclease (NUC) lobe. The REC lobe can be divided into three regions, a long a helix referred to as the bridge helix (residues 60-93), the REC1 (residues 94-179 and 308-713) domain, and the REC2 (residues 180-307) domain. The NUC lobe consists of the RuvC (residues 1-59, 718-769, and 909-1098), HNH (residues 775-908), and PAM-interacting (PI) (residues 1099-1368) domains. The negatively charged sgRNA:target DNA heteroduplex is accommodated in a positively charged groove at the interface between the REC and NUC lobes. In the NUC lobe, the RuvC domain is assembled from the three split RuvC motifs (RuvC I-III) and interfaces with the PI domain to form a positively charged surface that interacts with the 30 tail of the sgRNA. The HNH domain lies between the RuvC II-III motifs and forms only a few contacts with the rest of the protein. Structural aspects of SpCas9 are described by Nishimasu et al., Crystal Structure of Cas9 in Complex with Guide RNA and Target DNA, Cell 156, 935-949, Feb. 27, 2014.

[0206] REC lobe: The REC lobe includes the REC1 and REC2 domains. The REC2 domain does not contact the bound guide:target heteroduplex, indicating that truncation of REC lobe may be tolerated by SpCas9. Further, SpCas9 mutant lacking the REC2 domain (D175-307) retained ˜50% of the wild-type Cas9 activity, indicating that the REC2 domain is not critical for DNA cleavage. In striking contrast, the deletion of either the repeat-interacting region (D97-150) or the anti-repeat-interacting region (D312-409) of the REC1 domain abolished the DNA cleavage activity, indicating that the recognition of the repeat:anti-repeat duplex by the REC1 domain is critical for the Cas9 function.

[0207] PAM-Interacting domain: The NUC lobe contains the PAM-interacting (PI) domain that is positioned to recognize the PAM sequence on the noncomplementary DNA strand. The PI domain of SpCas9 is required for the recognition of 5′-NGG-3′ PAM, and deletion of the PI domain (A1099-1368) abolished the cleavage activity, indicating that the PI domain is critical for SpCas9 function and a major determinant for the PAM specificity.

[0208] RuvC domain: The RuvC nucleases of SpCas9 have an RNase H fold and four catalytic residues, Asp10 (Ala), Glu762, His983, and Asp986, that are critical for the two-metal cleavage of the noncomplementary strand of the target DNA. In addition to the conserved RNase H fold, the Cas9 RuvC domain has other structural elements involved in interactions with the guide:target heteroduplex (an end-capping loop between α42 and α43) and the PI domain/stem loop 3 (B hairpin formed by β3 and β4).

[0209] HNH domain: SpCas9 HNH nucleases have three catalytic residues, Asp839, His840, and Asn863 and cleave the complementary strand of the target DNA through a single-metal mechanism.

[0210] sgRNA:DNA recognition: The sgRNA guide region is primarily recognized by the REC lobe. The backbone phosphate groups of the guide region (nucleotides 2, 4-6, and 13-20) interact with the REC1 domain (Arg165, Gly166, Arg403, Asn407, Lys510, Tyr515, and Arg661) and the bridge helix (Arg63, Arg66, Arg70, Arg71, Arg74, and Arg78). The 20-hydroxyl groups of G1, C15, U16, and G19 hydrogen bond with Val1009, Tyr450, Arg447/Ile448, and Thr404, respectively.

[0211] A mutational analysis demonstrated that the R66A, R70A, and R74A mutations on the bridge helix markedly reduced the DNA cleavage activities, highlighting the functional significance of the recognition of the sgRNA “seed” region by the bridge helix. Although Arg78 and Arg165 also interact with the “seed” region, the R78A and R165A mutants showed only moderately decreased activities. These results are consistent with the fact that Arg66, Arg70, and Arg74 form multiple salt bridges with the sgRNA backbone, whereas Arg78 and Arg165 form a single salt bridge with the sgRNA backbone. Moreover, the alanine mutations of the repeat:anti-repeat duplex-interacting residues (Arg75 and Lys163) and the stemloop-1-interacting residue (Arg69) resulted in decreased DNA cleavage activity, confirming the functional importance of the recognition of the repeat:anti-repeat duplex and stem loop 1 by Cas9.

[0212] RNA-guided DNA targeting: SpCas9 recognizes the guide:target heteroduplex in a sequence-independent manner. The backbone phosphate groups of the target DNA (nucleotides 1, 9-11, 13, and 20) interact with the REC1 (Asn497, Trp659, Arg661, and Gln695), RuvC (Gln926), and PI (Glu1108) domains. The C2′ atoms of the target DNA (nucleotides 5, 7, 8, 11, 19, and 20) form van der Waals interactions with the REC1 domain (Leu169, Tyr450, Met495, Met694, and His698) and the RuvC domain (Ala728). The terminal base pair of the guide:target heteroduplex (G1:C20′) is recognized by the RuvC domain via end-capping interactions; the sgRNA G1 and target DNA C20′ nucleobases interact with the Tyr1013 and Val1015 side chains, respectively, whereas the 20-hydroxyl and phosphate groups of sgRNA G1 interact with Val1009 and Gln926, respectively.

[0213] Repeat: Anti-Repeat duplex recognition: The nucleobases of U23/A49 and A42/G43 hydrogen bond with the side chain of Arg1122 and the main-chain carbonyl group of Phe351, respectively. The nucleobase of the flipped U44 is sandwiched between Tyr325 and His328, with its N3 atom hydrogen bonded with Tyr325, whereas the nucleobase of the unpaired G43 stacks with Tyr359 and hydrogen bonds with Asp364.

[0214] The nucleobases of G21 and U50 in the G21:U50 wobble pair stack with the terminal C20:G10 pair in the guide:target heteroduplex and Tyr72 on the bridge helix, respectively, with the U50 O4 atom hydrogen bonded with Arg75. Notably, A51 adopts the syn conformation and is oriented in the direction opposite to U50. The nucleobase of A51 is sandwiched between Phe1105 and U63, with its N1, N6, and N7 atoms hydrogen bonded with G62, Gly1103, and Phe1105, respectively.

[0215] Stem-loop recognition: Stem loop 1 is primarily recognized by the REC lobe, together with the PI domain. The backbone phosphate groups of stem loop 1 (nucleotides 52, 53, and 59-61) interact with the REC1 domain (Leu455, Ser460, Arg467, Thr472, and I1e473), the PI domain (Lys1123 and Lys1124), and the bridge helix (Arg70 and Arg74), with the 20-hydroxyl group of G58 hydrogen bonded with Leu455. A52 interacts with Phe1105 through a face-to-edge p-p stacking interaction, and the flipped U59 nucleobase hydrogen bonds with Asn77.

[0216] The single-stranded linker and stem loops 2 and 3 are primarily recognized by the NUC lobe. The backbone phosphate groups of the linker (nucleotides 63-65 and 67) interact with the RuvC domain (Glu57, Lys742, and Lys1097), the PI domain (Thr1102), and the bridge helix (Arg69), with the 20-hydroxyl groups of U64 and A65 hydrogen bonded with Glu57 and His721, respectively. The C67 nucleobase forms two hydrogen bonds with Val1100.

[0217] Stem loop 2 is recognized by Cas9 via the interactions between the NUC lobe and the non-Watson-Crick A68:G81 pair, which is formed by direct (between the A68 N6 and G81 O6 atoms) and water-mediated (between the A68 N1 and G81 N1 atoms) hydrogen-bonding interactions. The A68 and G81 nucleobases contact Ser1351 and Tyr1356, respectively, whereas the A68:G81 pair interacts with Thr1358 via a water-mediated hydrogen bond. The 20-hydroxyl group of A68 hydrogen bonds with His1349, whereas the G81 nucleobase hydrogen bonds with Lys33.

[0218] Stem loop 3 interacts with the NUC lobe more extensively, as compared to stem loop 2. The backbone phosphate group of G92 interacts with the RuvC domain (Arg40 and Lys44), whereas the G89 and U90 nucleobases hydrogen bond with Gln1272 and Glu1225/Ala1227, respectively. The A88 and C91 nucleobases are recognized by Asn46 via multiple hydrogen-bonding interactions.

[0219] Cas9 proteins smaller than SpCas9 allow more efficient packaging of nucleic acids encoding CRISPR systems, e.g., Cas9 and sgRNA into one rAAV (“all-in-one-AAV”) particle. In addition, efficient packaging of CRISPR systems can be achieved in other viral vector systems (i.e., lentiviral, integration deficient lentiviral, hd-AAV, etc.) and non-viral vector systems (i.e., lipid nanoparticle). Small Cas9 proteins can be advantageous for multidomain-Cas-nuclease-based systems for prime editing. Well characterized smaller Cas9 proteins include Staphylococcus aureus (SauCas9, 1053 amino acid residues) and Campylobacter jejuni (CjCas9, 984 amino residues). However, both recognize longer PAMs, 5′-NNGRRT-3′ for SauCas9 (R=A or G) and 5′-NNNNRYAC-3′ for CjCas9 (Y=C or T), which reduces the number of uniquely addressable target sites in the genome, in comparison to the NGG SpCas9 PAM. Among smaller Cas9s, Schmidt et al. identified Staphylococcus lugdunensis (Slu) Cas9 as having genome-editing activity and provided homology mapping to SpCas9 and SauCas9 to facilitate generation of nickases and inactive (“dead”) enzymes (Schmidt et al., 2021, Improved CRISPR genome editing using small highly active and specific engineered RNA-guided nucleases. Nat Commun 12, 4219. doi.org/10.1038/s41467-021-24454-5) and engineered nucleases with higher cleavage activity by fragmenting and shuffling Cas9 DNAs. The small Cas9s and nickases are useful in the instant invention.

[0220] Besides dead Cas9 and Cas9 nickase variants, the Cas9 proteins used herein may also include other “Cas9 variants” having at least about 70% identical, at least about 80% identical, at least about 90% identical, at least about 95% identical, at least about 96% identical, at least about 97% identical, at least about 98% identical, at least about 99% identical, at least about 99.5% identical, or at least about 99.9% identical to any reference Cas9 protein, including any wild type Cas9, or mutant Cas9 (e.g., a dead Cas9 or Cas9 nickase), or fragment Cas9, or circular permutant Cas9, or other variant of Cas9 disclosed herein or known in the art. In some embodiments, a Cas9 variant may have 1, 2, 3, 4, 5, 6, 7, 8, 9, 10, 11, 12, 13, 14, 15, 16, 17, 18, 19, 20, 21, 22, 21, 24, 25, 26, 27, 28, 29, 30, 31, 32, 33, 34, 35, 36, 37, 38, 39, 40, 41, 42, 43, 44, 45, 46, 47, 48, 49, 50 or more amino acid changes compared to a reference Cas9. In some embodiments, the Cas9 variant comprises a fragment of a reference Cas9 (e.g., a gRNA binding domain or a DNA-cleavage domain), such that the fragment is at least about 70% identical, at least about 80% identical, at least about 90% identical, at least about 95% identical, at least about 96% identical, at least about 97% identical, at least about 98% identical, at least about 99% identical, at least about 99.5% identical, or at least about 99.9% identical to the corresponding fragment of wild type Cas9. In some embodiments, the fragment is at least 30%, at least 35%, at least 40%, at least 45%, at least 50%, at least 55%, at least 60%, at least 65%, at least 70%, at least 75%, at least 80%, at least 85%, at least 90%, at least 95% identical, at least 96%, at least 97%, at least 98%, at least 99%, or at least 99.5% of the amino acid length of a corresponding wild type Cas9 (e.g., SEQ ID NO: 18).

[0221] In some embodiments, the disclosure also may utilize Cas9 fragments that retain their functionality and that are fragments of any herein disclosed Cas9 protein. In some embodiments, the Cas9 fragment is at least 100 amino acids in length. In some embodiments, the fragment is at least 100, 150, 200, 250, 300, 350, 400, 450, 500, 550, 600, 650, 700, 750, 800, 850, 900, 950, 1000, 1050, 1100, 1150, 1200, 1250, or at least 1300 amino acids in length.

[0222] In various embodiments, the prime editors disclosed herein may comprise one of the Cas9 variants described as follows, or a Cas9 variant thereof having at least about 70% identical, at least about 80% identical, at least about 90% identical, at least about 95% identical, at least about 96% identical, at least about 97% identical, at least about 98% identical, at least about 99% identical, at least about 99.5% identical, or at least about 99.9% identical to any reference Cas9 variants.

TABLE 4
Cas9 orthologs

| | | |
|---|---|---|
| Streptococcus | MDKKYSIGLD IGTNSVGWAV ITDEYKVPSK KFKVLGNTDR HSIKKNLIGA | (SEQ |
| pyogenes | LLFDSGETAE ATRLKRTARR RYTRRKNRIC YLQEIFSNEM AKVDDSFFHR | ID NO: |
| AJN60024.1 | LEESFLVEED KKHERHPIFG NIVDEVAYHE KYPTIYHLRK KLVDSTDKAD | 21) |
| GI: 757015980 | LRLIYLALAH MIKFRGHFLI EGDLNPDNSD VDKLFIQLVQ TYNQLFEENP | |
| WP_01092225 | INASGVDAKA ILSARLSKSR RLENLIAQLP GEKKNGLFGN LIALSLGLTP | |
| 1.1 | NFKSNFDLAE DAKLQLSKDT YDDDLDNLLA QIGDQYADLF LAAKNLSDAI | |
| | LLSDILRVNT EITKAPLSAS MIKRYDEHHQ DLTLLKALVR QQLPEKYKEI | |
| | FFDQSKNGYA GYIDGGASQE EFYKFIKPIL EKMDGTEELL VKLNREDLLR | |
| | KQRTFDNGSI PHQIHLGELH AILRRQEDFY PFLKDNREKI EKILTFRIPY | |
| | YVGPLARGNS RFAWMTRKSE ETITPWNFEE VVDKGASAQS FIERMTNFDK | |
| | NLPNEKVLPK HSLLYEYFTV YNELTKVKYV TEGMRKPAFL SGEQKKAIVD | |
| | LLFKTNRKVT VKQLKEDYFK KIECFDSVEI SGVEDRFNAS LGTYHDLLKI | |
| | IKDKDFLDNE ENEDILEDIV LTLTLFEDRE MIEERLKTYA HLFDDKVMKQ | |
| | LKRRRYTGWG RLSRKLINGI RDKQSGKTIL DFLKSDGFAN RNFMQLIHDD | |
| | SLTFKEDIQK AQVSGQGDSL HEHIANLAGS PAIKKGILQT VKVVDELVKV | |
| | MGRHKPENIV IEMARENQTT QKGQKNSRER MKRIEEGIKE LGSQILKEHP | |
| | VENTQLQNEK LYLYYLQNGR DMYVDQELDI NRLSDYDVDH IVPQSFLKDD | |
| | SIDNKVLTRS DKNRGKSDNV PSEEVVKKMK NYWRQLLNAK LITQRKFDNL | |
| | TKAERGGLSE LDKAGFIKRQ LVETRQITKH VAQILDSRMN TKYDENDKLI | |
| | REVKVITLKS KLVSDFRKDF QFYKVREINN YHHAHDAYLN AVVGTALIKK | |
| | YPKLESEFVY GDYKVYDVRK MIAKSEQEIG KATAKYFFYS NIMNFFKTEI | |
| | TLANGEIRKR PLIETNGETG EIVWDKGRDF ATVRKVLSMP QVNIVKKTEV | |
| | QTGGFSKESI LPKRNSDKLI ARKKDWDPKK YGGFDSPTVA YSVLVVAKVE | |
| | KGKSKKLKSV KELLGITIME RSSFEKNPID FLEAKGYKEV KKDLIIKLPK | |
| | YSLFELENGR KRMLASAGEL QKGNELALPS KYVNFLYLAS HYEKLKGSPE | |
| | DNEQKQLFVE QHKHYLDEII EQISEFSKRV ILADANLDKV LSAYNKHRDK | |
| | PIREQAENII HLFTLTNLGA PAAFKYFDTT IDRKRYTSTK EVLDATLIHQ | |
| | SITGLYETRI DLS | |
| AJN60021.1 | MKRNYILGLD IGITSVGYGI IDYETRDVID AGVRLFKEAN VENNEGRRSK | (SEQ |
| GI: 757015977 | RGARRLKRRR RHRIQRVKKL LFDYNLLTDH SELSGINPYE ARVKGLSQKL | ID NO: |
| J7RUA5.1 | SEEEFSAALL HLAKRRGVHN VNEVEEDTGN ELSTKEQISR NSKALEEKYV | 22) |
| WP_05301979 | AELQLERLKK DGEVRGSINR FKTSDYVKEA KQLLKVQKAY HQLDQSFIDT | |
| 4.1 | YIDLLETRRT YYEGPGEGSP FGWKDIKEWY EMLMGHCTYF PEELRSVKYA | |
| Staphylococcus | YNADLYNALN DLNNLVITRD ENEKLEYYEK FQIIENVFKQ KKKPTLKQIA | |
| aureus | KEILVNEEDI KGYRVTSTGK PEFTNLKVYH DIKDITARKE IIENAELLDQ | |
| | IAKILTIYQS SEDIQEELTN LNSELTQEEI EQISNLKGYT GTHNLSLKAI | |
| | NLILDELWHT NDNQIAIFNR LKLVPKKVDL SQQKEIPTTL VDDFILSPVV | |
| | KRSFIQSIKV INAIIKKYGL PNDIIIELAR EKNSKDAQKM INEMQKRNRQ | |
| | TNERIEEIIR TTGKENAKYL IEKIKLHDMQ EGKCLYSLEA IPLEDLLNNP | |
| | FNYEVDHIIP RSVSFDNSFN NKVLVKQEEN SKKGNRTPFQ YLSSSDSKIS | |
| | YETFKKHILN LAKGKGRISK TKKEYLLEER DINRFSVQKD FINRNLVDTR | |
| | YATRGLMNLL RSYFRVNNLD VKVKSINGGF TSFLRRKWKF KKERNKGYKH | |
| | HAEDALIIAN ADFIFKEWKK LDKAKKVMEN QMFEEKQAES MPEIETEQEY | |
| | KEIFITPHQI KHIKDFKDYK YSHRVDKKPN RELINDTLYS TRKDDKGNTL | |
| | IVNNLNGLYD KDNDKLKKLI NKSPEKLLMY HHDPQTYQKL KLIMEQYGDE | |
| | KNPLYKYYEE TGNYLTKYSK KDNGPVIKKI KYYGNKLNAH LDITDDYPNS | |
| | RNKVVKLSLK PYRFDVYLDN GVYKFVTVKN LDVIKKENYY EVNSKCYEEA | |
| | KKLKKISNQA EFIASFYNND LIKINGELYR VIGVNNDLLN RIEVNMIDIT | |
| | YREYLENMND KRPPRIIKTI ASKTQSIKKY STDILGNLYE VKSKKHPQII | |
| | KKG | |
| AJN60008.1 | MARILAFDIG ISSIGWAFSE NDELKDCGVR IFTKVENPKT GESLALPRRL | (SEQ |
| GI: 757015964 | ARSARKRLAR RKARLNHLKH LIANEFKLNY EDYQSFDESL AKAYKGSLIS | ID NO: |
| WP_00286448 | PYELRFRALN ELLSKQDFAR VILHIAKRRG YDDIKNSDDK EKGAILKAIK | 23) |
| 5.1 | QNEEKLANYQ SVGEYLYKEY FQKFKENSKE FTNVRNKKES YERCIAQSFL | |
| Campylobacter | KDELKLIFKK QREFGFSFSK KFEEEVLSVA FYKRALKDFS HLVGNCSFFT | |
| jejuni subsp. | DEKRAPKNSP LAFMFVALTR IINLLNNLKN TEGILYTKDD LNALLNEVLK | |
| jejuni NCTC | NGTLTYKQTK KLLGLSDDYE FKGEKGTYFI EFKKYKEFIK ALGEHNLSQD | |
| 11168 = ATCC | DLNEIAKDIT LIKDEIKLKK ALAKYDLNQN QIDSLSKLEF KDHLNISFKA | |
| 700819 | LKLVTPLMLE GKKYDEACNE LNLKVAINED KKDFLPAFNE TYYKDEVTNP | |
| | VVLRAIKEYR KVLNALLKKY GKVHKINIEL AREVGKNHSQ RAKIEKEQNE | |
| | NYKAKKDAEL ECEKLGLKIN SKNILKLRLF KEQKEFCAYS GEKIKISDLQ | |
| | DEKMLEIDHI YPYSRSFDDS YMNKVLVFTK QNQEKLNQTP FEAFGNDSAK | |
| | WQKIEVLAKN LPTKKQKRIL DKNYKDKEQK NFKDRNLNDT RYIARLVLNY | |
| | TKDYLDFLPL SDDENTKLND TQKGSKVHVE AKSGMLTSAL RHTWGFSAKD | |
| | RNNHLHHAID AVIIAYANNS IVKAFSDFKK EQESNSAELY AKKISELDYK | |
| | NKRKFFEPFS GFRQKVLDKI DEIFVSKPER KKPSGALHEE TFRKEEEFYQ | |
| | SYGGKEGVLK ALELGKIRKV NGKIVKNGDM FRVDIFKHKK TNKFYAVPIY | |
| | TMDFALKVLP NKAVARSKKG EIKDWILMDE NYEFCFSLYK DSLILIQTKD | |
| | MQEPEFVYYN AFTSSTVSLI VSKHDNKFET LSKNQKILFK NANEKEVIAK | |
| | SIGIQNLKVF EKYIVSALGE VTKAEFRQRE DFKK | |
| Streptococcus | MSDLVLGLDI GIGSVGVGIL NKVTGEIIHK NSRIFPAAQA ENNLVRRTNR | (SEQ |
| thermophilus | QGRRLARRKK HRRVRLNRLF EESGLITDFT KISINLNPYQ LRVKGLTDEL | ID NO: |
| LMD-9 | SNEELFIALK NMVKHRGISY LDDASDDGNS SVGDYAQIVK ENSKQLETKT | 24) |
| AJN60026.1 | PGQIQLERYQ TYGQLRGDFT VEKDGKKHRL INVFPTSAYR SEALRILQTQ | |
| GI: 757015982 | QEFNPQITDE FINRYLEILT GKRKYYHGPG NEKSRTDYGR YRTSGETLDN | |
| WP_01168095 | IFGILIGKCT FYPDEFRAAK ASYTAQEFNL LNDLNNLTVP TETKKLSKEQ | |
| 7.1 | KNQIINYVKN EKAMGPAKLF KYIAKLLSCD VADIKGYRID KSGKAEIHTF | |
| | EAYRKMKTLE TLDIEQMDRE TLDKLAYVLT LNTEREGIQE ALEHEFADGS | |
| | FSQKQVDELV QFRKANSSIF GKGWHNFSVK LMMELIPELY ETSEEQMTIL | |
| | TRLGKQKTTS SSNKTKYIDE KLLTEEIYNP VVAKSVRQAI KIVNAAIKEY | |
| | GDFDNIVIEM ARETNEDDEK KAIQKIQKAN KDEKDAAMLK AANQYNGKAE | |
| | LPHSVFHGHK QLATKIRLWH QQGERCLYTG KTISIHDLIN NSNQFEVDHI | |
| | LPLSITFDDS LANKVLVYAT ANQEKGQRTP YQALDSMDDA WSFRELKAFV | |
| | RESKTLSNKK KEYLLTEEDI SKFDVRKKFI ERNLVDTRYA SRVVLNALQE | |
| | HFRAHKIDTK VSWVRGQFTS QLRRHWGIEK TRDTYHHHAV DALIIAASSQ | |
| | LNLWKKQKNT LVSYSEDQLL DIETGELISD DEYKESVFKA PYQHFVDTLK | |
| | SKEFEDSILF SYQVDSKFNR KISDATIYAT RQAKVGKDKA DETYVLGKIK | |
| | DIYTQDGYDA FMKIYKKDKS KFLMYRHDPQ TFEKVIEPIL ENYPNKQINE | |
| | KGKEVPCNPF LKYKEEHGYI RKYSKKGNGP EIKSLKYYDS KLGNHIDITP | |
| | KDSNNKVVLQ SVSPWRADVY FNKTTGKYEI LGLKYADLQF EKGTGTYKIS | |
| | QEKYNDIKKK EGVDSDSEFK FTLYKNDLLL VKDTETKEQQ LFRFLSRTMP | |
| | KQKHYVELKP YDKQKFEGGE ALIKVLGNVA NSGQCKKGLG KSNISIYKVR | |
| | TDVLGNQHII KNEGDKPKLD F | |
| Parvibaculum | MERIFGFDIG TTSIGFSVID YSSTQSAGNI QRLGVRIFPE ARDPDGTPLN | (SEQ |
| lavamentivorans | QQRRQKRMMR RQLRRRRIRR KALNETLHEA GFLPAYGSAD WPVVMADEPY | ID NO: |
| DS-1 | ELRRRGLEEG LSAYEFGRAI YHLAQHRHFK GRELEESDTP DPDVDDEKEA | 25) |
| AJN60020.1 | ANERAATLKA LKNEQTTLGA WLARRPPSDR KRGIHAHRNV VAEEFERLWE | |
| GI: 757015976 | VQSKFHPALK SEEMRARISD TIFAQRPVFW RKNTLGECRF MPGEPLCPKG | |
| WP_01199501 | SWLSQQRRML EKLNNLAIAG GNARPLDAEE RDAILSKLQQ QASMSWPGVR | |
| 3.1 | SALKALYKQR GEPGAEKSLK FNLELGGESK LLGNALEAKL ADMFGPDWPA | |
| | HPRKQEIRHA VHERLWAADY GETPDKKRVI ILSEKDRKAH REAAANSFVA | |
| | DFGITGEQAA QLQALKLPTG WEPYSIPALN LFLAELEKGE RFGALVNGPD | |
| | WEGWRRTNFP HRNQPTGEIL DKLPSPASKE ERERISQLRN PTWVRTQNEL | |
| | RKWVNNLIGL YGKPDRIRIE VGRDVGKSKR EREEIQSGIR RNEKQRKKAT | |
| | EDLIKNGIAN PSRDDVEKWI LWKEGQERCP YTGDQIGFNA LFREGRYEVE | |
| | HIWPRSRSFD NSPRNKTLCR KDVNIEKGNR MPFEAFGHDE DRWSAIQIRL | |
| | QGMVSAKGGT GMSPGKVKRF LAKTMPEDFA ARQLNDTRYA AKQILAQLKR | |
| | LWPDMGPEAP VKVEAVTGQV TAQLRKLWTL NNILADDGEK TRADHRHHAI | |
| | DALTVACTHP GMTNKLSRYW QLRDDPRAEK PALTPPWDTI RADAEKAVSE | |
| | IVVSHRVRKK VSGPLHKETT YGDTGTDIKT KSGTYRQFVT RKKIESLSKG | |
| | ELDEIRDPRI KEIVAAHVAG RGGDPKKAFP PYPCVSPGGP EIRKVRLTSK | |
| | QQLNLMAQTG NGYADLGSNH HIAIYRLPDG KADFEIVSLF DASRRLAQRN | |
| | PIVQRTRADG ASFVMSLAAG EAIMIPEGSK KGIWIVQGVW ASGQVVLERD | |
| | TDADHSTTTR PMPNPILKDD AKKVSIDPIG RVRPSND | |
| Corynebacterium | MKYHVGIDVG TFSVGLAAIE VDDAGMPIKT LSLVSHIHDS GLDPDEIKSA | (SEQ |
| diphtheriae | VTRLASSGIA RRTRRLYRRK RRRLQQLDKF IQRQGWPVIE LEDYSDPLYP | ID NO: |
| NCTC 13129 | WKVRAELAAS YIADEKERGE KLSVALRHIA RHRGWRNPYA KVSSLYLPDG | 26) |
| AJN60012.1 | PSDAFKAIRE EIKRASGQPV PETATVGQMV TLCELGTLKL RGEGGVLSAR | |
| GI: 757015968 | LQQSDYAREI QEICRMQEIG QELYRKIIDV VFAAESPKGS ASSRVGKDPL | |
| WP_01093396 | QPGKNRALKA SDAFQRYRIA ALIGNLRVRV DGEKRILSVE EKNLVFDHLV | |
| 8.1 | NLTPKKEPEW VTIAEILGID RGQLIGTATM TDDGERAGAR PPTHDTNRSI | |
| | VNSRIAPLVD WWKTASALEQ HAMVKALSNA EVDDFDSPEG AKVQAFFADL | |
| | DDDVHAKLDS LHLPVGRAAY SEDTLVRLTR RMLSDGVDLY TARLQEFGIE | |
| | PSWTPPTPRI GEPVGNPAVD RVLKTVSRWL ESATKTWGAP ERVIIEHVRE | |
| | GFVTEKRARE MDGDMRRRAA RNAKLFQEMQ EKLNVQGKPS RADLWRYQSV | |
| | QRQNCQCAYC GSPITFSNSE MDHIVPRAGQ GSTNTRENLV AVCHRCNQSK | |
| | GNTPFAIWAK NTSIEGVSVK EAVERTRHWV TDTGMRSTDF KKFTKAVVER | |
| | FQRATMDEEI DARSMESVAW MANELRSRVA QHFASHGTTV RVYRGSLTAE | |
| | ARRASGISGK LKFFDGVGKS RLDRRHHAID AAVIAFTSDY VAETLAVRSN | |
| | LKQSQAHRQE APQWREFTGK DAEHRAAWRV WCQKMEKLSA LLTEDLRDDR | |
| | WVVMSNVRLR LGNGSAHKET IGKLSKVKLS SQLSVSDIDK ASSEALWCAL | |
| | TREPGFDPKE GLPANPERHI RVNGTHVYAG DNIGLFPVSA GSIALRGGYA | |
| | ELGSSFHHAR VYKITSGKKP AFAMLRVYTI DLLPYRNQDL FSVELKPQTM | |
| | SMRQAEKKLR DALATGNAEY LGWLVVDDEL VVDTSKIATD QVKAVEAELG | |
| | TIRRWRVDGF FSPSKLRLRP LQMSKEGIKK ESAPELSKII DRPGWLPAVN | |
| | KLFSDGNVTV VRRDSLGRVR LESTAHLPVT WKVQ | |
| Streptococcus | MTNGKILGLD IGIASVGVGI IEAKTGKVVH ANSRLFSAAN AENNAERRGF | (SEQ |
| pasteurianus | RGSRRLNRRK KHRVKRVRDL FEKYGIVTDF RNLNLNPYEL RVKGLTEQLK | ID NO: |
| WP_01385204 | NEELFAALRT ISKRRGISYL DDAEDDSTGS TDYAKSIDEN RRLLKNKTPG | 27) |
| 8.1 | QIQLERLEKY GQLRGNFTVY DENGEAHRLI NVFSTSDYEK EARKILETQA | |
| | DYNKKITAEF IDDYVEILTQ KRKYYHGPGN EKSRTDYGRF RTDGTTLENI | |
| | FGILIGKCNF YPDEYRASKA SYTAQEYNFL NDLNNLKVST ETGKLSTEQK | |
| | ESLVEFAKNT ATLGPAKLLK EIAKILDCKV DEIKGYREDD KGKPDLHTFE | |
| | PYRKLKFNLE SINIDDLSRE VIDKLADILT LNTEREGIED AIKRNLPNQF | |
| | TEEQISEIIK VRKSQSTAFN KGWHSFSAKL MNELIPELYA TSDEQMTILT | |
| | RLEKFKVNKK SSKNTKTIDE KEVTDEIYNP VVAKSVRQTI KIINAAVKKY | |
| | GDFDKIVIEM PRDKNADDEK KFIDKRNKEN KKEKDDALKR AAYLYNSSDK | |
| | LPDEVFHGNK QLETKIRLWY QQGERCLYSG KPISIQELVH NSNNFEIDHI | |
| | LPLSLSFDDS LANKVLVYAW TNQEKGQKTP YQVIDSMDAA WSFREMKDYV | |
| | LKQKGLGKKK RDYLLTTENI DKIEVKKKFI ERNLVDTRYA SRVVLNSLQS | |
| | ALRELGKDTK VSVVRGQFTS QLRRKWKIDK SRETYHHHAV DALIIAASSQ | |
| | LKLWEKQDNP MFVDYGKNQV VDKQTGEILS VSDDEYKELV FQPPYQGFVN | |
| | TISSKGFEDE ILFSYQVDSK YNRKVSDATI YSTRKAKIGK DKKEETYVLG | |
| | KIKDIYSQNG FDTFIKKYNK DKTQFLMYQK DSLTWENVIE VILRDYPTTK | |
| | KSEDGKNDVK CNPFEEYRRE NGLICKYSKK GKGTPIKSLK YYDKKLGNCI | |
| | DITPEESRNK VILQSINPWR ADVYFNPETL KYELMGLKYS DLSFEKGTGN | |
| | YHISQEKYDA IKEKEGIGKK SEFKFTLYRN DLILIKDIAS GEQEIYRFLS | |
| | RTMPNVNHYV ELKPYDKEKF DNVQELVEAL GEADKVGRCI KGLNKPNISI | |
| | YKVRTDVLGN KYFVKKKGDK PKLDFKNNK K | |
| Neisseria | MAAFKPNPMN YILGLDIGIA SVGWAIVEID EEENPIRLID LGVRVFERAE | (SEQ |
| cinerea ATCC | VPKTGDSLAA ARRLARSVRR LTRRRAHRLL RARRLLKREG VLQAADFDEN | ID NO: |
| 14685 | GLIKSLPNTP WQLRAAALDR KLTPLEWSAV LLHLIKHRGY LSQRKNEGET | 28) |
| AJN60019.1 | ADKELGALLK GVADNTHALQ TGDFRTPAEL ALNKFEKESG HIRNQRGDYS | |
| GI: 757015975 | HTFNRKDLQA ELNLLFEKQK EFGNPHVSDG LKEGIETLLM TQRPALSGDA | |
| WP_00367641 | VQKMLGHCTF EPTEPKAAKN TYTAERFVWL TKLNNLRILE QGSERPLTDT | |
| 0.1 | ERATLMDEPY RKSKLTYAQA RKLLDLDDTA FFKGLRYGKD NAEASTLMEM | |
| | KAYHAISRAL EKEGLKDKKS PLNLSPELQD EIGTAFSLFK TDEDITGRLK | |
| | DRVQPEILEA LLKHISFDKF VQISLKALRR IVPLMEQGNR YDEACTEIYG | |
| | DHYGKKNTEE KIYLPPIPAD EIRNPVVLRA LSQARKVING VVRRYGSPAR | |
| | IHIETAREVG KSFKDRKEIE KRQEENRKDR EKSAAKFREY FPNFVGEPKS | |
| | KDILKLRLYE QQHGKCLYSG KEINLGRLNE KGYVEIDHAL PFSRTWDDSF | |
| | NNKVLALGSE NQNKGNQTPY EYFNGKDNSR EWQEFKARVE TSRFPRSKKQ | |
| | RILLQKFDED GFKERNLNDT RYINRFLCQF VADHMLLTGK GKRRVFASNG | |
| | QITNLLRGFW GLRKVRAEND RHHALDAVVV ACSTIAMQQK ITRFVRYKEM | |
| | NAFDGKTIDK ETGEVLHQKA HFPQPWEFFA QEVMIRVFGK PDGKPEFEEA | |
| | DTPEKLRTLL AEKLSSRPEA VHKYVTPLFI SRAPNRKMSG QGHMETVKSA | |
| | KRLDEGISVL RVPLTQLKLK DLEKMVNRER EPKLYEALKA RLEAHKDDPA | |
| | KAFAEPFYKY DKAGNRTQQV KAVRVEQVQK TGVWVHNHNG IADNATIVRV | |
| | DVFEKGGKYY LVPIYSWQVA KGILPDRAWV QGKDEEDWTV MDDSFEFKFV | |
| | LYANDLIKLT AKKNEFLGYF VSLNRATGAI DIRTHDTDST KGKNGIFQSV | |
| | GVKTALSFQK YQIDELGKEI RPCRLKKRPP VR | |
| AJN60009.1 | MSDLVLGLDI GIGSVGVGIL NKVTGEIIHK NSRIFPAAQA ENNLVRRTNR | (SEQ |
| GI: 757015965 | QGRRLARRKK HRRVRLNRLF EESGLITDFT KISINLNPYQ LRVKGLTDEL | ID NO: |
| St1Cas9 + | SNEELFIALK NMVKHRGISY LDDASDDGNS SVGDYAQIVK ENSKQLETKT | 29) |
| SpCas9 | PGQIQLERYQ TYGQLRGDFT VEKDGKKHRL INVFPTSAYR SEALRILQTQ | |
| | QEFNPQITDE FINRYLEILT GKRKYYHGPG NEKSRTDYGR YRTSGETLDN | |
| | IFGILIGKCT FYPDEFRAAK ASYTAQEFNL LNDLNNLTVP TETKKLSKEQ | |
| | KNQIINYVKN EKAMGPAKLF KYIAKLLSCD VADIKGYRID KSGKAEIHTF | |
| | EAYRKMKTLE TLDIEQMDRE TLDKLAYVLT LNTEREGIQE ALEHEFADGS | |
| | FSQKQVDELV QFRKANSSIF GKGWHNFSVK LMMELIPELY ETSEEQMTIL | |
| | TRLGKQKTTS SSNKTKYIDE KLLTEEIYNP VVAKSVRQAI KIVNAAIKEY | |
| | GDFDNIVIEM ARENQTTQKG QKNSRERMKR IEEGIKELGS QILKEHPVEN | |
| | TQLQNEKLYL YYLQNGRDMY VDQELDINRL SDYDVDHIVP QSFLKDDSID | |
| | NKVLTRSDKN RGKSDNVPSE EVVKKMKNYW RQLLNAKLIT QRKFDNLTKA | |
| | ERGGLSELDK AGFIKRQLVE TRQITKHVAQ ILDSRMNTKY DENDKLIREV | |
| | KVITLKSKLV SDFRKDFQFY KVREINNYHH AHDAYLNAVV GTALIKKYPK | |
| | LESEFVYGDY KVYDVRKMIA KSEQEIGKAT AKYFFYSNIM NFFKTEITLA | |
| | NGEIRKRPLI ETNGETGEIV WDKGRDFATV RKVLSMPQVN IVKKTEVQTG | |
| | GFSKESILPK RNSDKLIARK KDWDPKKYGG FDSPTVAYSV LWVAKVEKGK | |
| | SKKLKSVKEL LGITIMERSS FEKNPIDFLE AKGYKEVKKD LIIKLPKYSL | |
| | FELENGRKRM LASAGELQKG NELALPSKYV NFLYLASHYE KLKGSPEDNE | |
| | QKQLFVEQHK HYLDEIIEQI SEFSKRVILA DANLDKVLSA YNKHRDKPIR | |
| | EQAENIIHLF TLTNLGAPAA FKYFDTTIDR KRYTSTKEVL DATLIHQSIT | |
| | GLYETRIDLS QLGGD | |
| Campylobacter | MRILGFDIGI NSIGWAFVEN DELKDCGVRI FTKAENPKNK ESLALPRRNA | (SEQ |
| lari Cas9 | RSSRRRLKRR KARLIAIKRI LAKELKLNYK DYVAADGELP KAYEGSLASV | ID NO: |
| BAK69486.1 | YELRYKALTQ NLETKDLARV ILHIAKHRGY MNKNEKKSND AKKGKILSAL | 30) |
| | KNNALKLENY QSVGEYFYKE FFQKYKKNTK NFIKIRNTKD NYNNCVLSSD | |
| | LEKELKLILE KQKEFGYNYS EDFINEILKV AFFQRPLKDF SHLVGACTFF | |
| | EEEKRACKNS YSAWEFVALT KIINEIKSLE KISGEIVPTQ TINEVLNLIL | |
| | DKGSITYKKF RSCINLHESI SFKSLKYDKE NAENAKLIDF RKLVEFKKAL | |
| | GVHSLSRQEL DQISTHITLI KDNVKLKTVL EKYNLSNEQI NNLLEIEFND | |
| | YINLSFKALG MILPLMREGK RYDEACEIAN LKPKTVDEKK DFLPAFCDSI | |
| | FAHELSNPVV NRAISEYRKV LNALLKKYGK VHKIHLELAR DVGLSKKARE | |
| | KIEKEQKENQ AVNAWALKEC ENIGLKASAK NILKLKLWKE QKEICIYSGN | |
| | KISIEHLKDE KALEVDHIYP YSRSFDDSFI NKVLVFTKEN QEKLNKTPFE | |
| | AFGKNIEKWS KIQTLAQNLP YKKKNKILDE NFKDKQQEDF ISRNLNDTRY | |
| | IATLIAKYTK EYLNFLLLSE NENANLKSGE KGSKIHVQTI SGMLTSVLRH | |
| | TWGFDKKDRN NHLHHALDAI IVAYSTNSII KAFSDFRKNQ ELLKARFYAK | |
| | ELTSDNYKHQ VKFFEPFKSF REKILSKIDE IFVSKPPRKR ARRALHKDTF | |
| | HSENKIIDKC SYNSKEGLQI ALSCGRVRKI GTKYVENDTI VRVDIFKKQN | |
| | KFYAIPIYAM DFALGILPNK IVITGKDKNN NPKQWQTIDE SYEFCFSLYK | |
| | NDLILLQKKN MQEPEFAYYN DFSISTSSIC VEKHDNKFEN LTSNQKLLFS | |
| | NAKEGSVKVE SLGIQNLKVF EKYIITPLGD KIKADFQPRE NISLKTSKKY | |
| | GLR | |
| AJN60010.1 | MDKKYSIGLD IGTNSVGWAV ITDEYKVPSK KFKVLGNTDR HSIKKNLIGA | (SEQ |
| GI: 757015966 | LLFDSGETAE ATRLKRTARR RYTRRKNRIC YLQEIFSNEM AKVDDSFFHR | ID NO: |
| SpCas9 + | LEESFLVEED KKHERHPIFG NIVDEVAYHE KYPTIYHLRK KLVDSTDKAD | 31) |
| St1Cas9 | LRLIYLALAH MIKFRGHFLI EGDLNPDNSD VDKLFIQLVQ TYNQLFEENP | |
| | INASGVDAKA ILSARLSKSR RLENLIAQLP GEKKNGLFGN LIALSLGLTP | |
| | NFKSNFDLAE DAKLQLSKDT YDDDLDNLLA QIGDQYADLF LAAKNLSDAI | |
| | LLSDILRVNT EITKAPLSAS MIKRYDEHHQ DLTLLKALVR QQLPEKYKEI | |
| | FFDQSKNGYA GYIDGGASQE EFYKFIKPIL EKMDGTEELL VKLNREDLLR | |
| | KQRTFDNGSI PHQIHLGELH AILRRQEDFY PFLKDNREKI EKILTFRIPY | |
| | YVGPLARGNS RFAWMTRKSE ETITPWNFEE VVDKGASAQS FIERMTNFDK | |
| | NLPNEKVLPK HSLLYEYFTV YNELTKVKYV TEGMRKPAFL SGEQKKAIVD | |
| | LLFKTNRKVT VKQLKEDYFK KIECFDSVEI SGVEDRFNAS LGTYHDLLKI | |
| | IKDKDFLDNE ENEDILEDIV LTLTLFEDRE MIEERLKTYA HLFDDKVMKQ | |
| | LKRRRYTGWG RLSRKLINGI RDKQSGKTIL DFLKSDGFAN RNFMQLIHDD | |
| | SLTFKEDIQK AQVSGQGDSL HEHIANLAGS PAIKKGILQT VKVVDELVKV | |
| | MGRHKPENIV IEMARETNED DEKKAIQKIQ KANKDEKDAA MLKAANQYNG | |
| | KAELPHSVFH GHKQLATKIR LWHQQGERCL YTGKTISIHD LINNSNQFEV | |
| | DHILPLSITF DDSLANKVLV YATANQEKGQ RTPYQALDSM DDAWSFRELK | |
| | AFVRESKTLS NKKKEYLLTE EDISKFDVRK KFIERNLVDT RYASRVVLNA | |
| | LQEHFRAHKI DTKVSVVRGQ FTSQLRRHWG IEKTRDTYHH HAVDALIIAA | |
| | SSQLNLWKKQ KNTLVSYSED QLLDIETGEL ISDDEYKESV FKAPYQHFVD | |
| | TLKSKEFEDS ILFSYQVDSK FNRKISDATI YATRQAKVGK DKADETYVLG | |
| | KIKDIYTQDG YDAFMKIYKK DKSKFLMYRH DPQTFEKVIE PILENYPNKQ | |
| | INEKGKEVPC NPFLKYKEEH GYIRKYSKKG NGPEIKSLKY YDSKLGNHID | |
| | ITPKDSNNKV VLQSVSPWRA DVYFNKTTGK YEILGLKYAD LQFEKGTGTY | |
| | KISQEKYNDI KKKEGVDSDS EFKFTLYKND LLLVKDTETK EQQLFRFLSR | |
| | TMPKQKHYVE LKPYDKQKFE GGEALIKVLG NVANSGQCKK GLGKSNISIY | |
| | KVRTDVLGNQ HIIKNEGDKP KLDF | |
| SpCas9 | MDKKYSIGLD IGTNSVGWAV ITDEYKVPSK KFKVLGNTDR HSIKKNLIGA | (SEQ |
| inactive | LLFDSGETAE ATRLKRTARR RYTRRKNRIC YLQEIFSNEM AKVDDSFFHR | ID NO: |
| AJN60011.1 | LEESFLVEED KKHERHPIFG NIVDEVAYHE KYPTIYHLRK KLVDSTDKAD | 32) |
| GI: 757015967 | LRLIYLALAH MIKFRGHFLI EGDLNPDNSD VDKLFIQLVQ TYNQLFEENP | |
| | INASGVDAKA ILSARLSKSR RLENLIAQLP GEKKNGLFGN LIALSLGLTP | |
| | NFKSNFDLAE DAKLQLSKDT YDDDLDNLLA QIGDQYADLF LAAKNLSDAI | |
| | LLSDILRVNT EITKAPLSAS MIKRYDEHHQ DLTLLKALVR QQLPEKYKEI | |
| | FFDQSKNGYA GYIDGGASQE EFYKFIKPIL EKMDGTEELL VKLNREDLLR | |
| | KQRTFDNGSI PHQIHLGELH AILRRQEDFY PFLKDNREKI EKILTFRIPY | |
| | YVGPLARGNS RFAWMTRKSE ETITPWNFEE VVDKGASAQS FIERMTNFDK | |
| | NLPNEKVLPK HSLLYEYFTV YNELTKVKYV TEGMRKPAFL SGEQKKAIVD | |
| | LLFKTNRKVT VKQLKEDYFK KIECFDSVEI SGVEDRFNAS LGTYHDLLKI | |
| | IKDKDFLDNE ENEDILEDIV LTLTLFEDRE MIEERLKTYA HLFDDKVMKQ | |
| | LKRRRYTGWG RLSRKLINGI RDKQSGKTIL DFLKSDGFAN RNFMQLIHDD | |
| | SLTFKEDIQK AQVSGQGDSL HEHIANLAGS PAIKKGILQT VKVVDELVKV | |
| | MGRHKPENIV IAMARENQTT QKGQKNSRER MKRIEEGIKE LGSQILKEHP | |
| | VENTQLQNEK LYLYYLQNGR DMYVDQELDI NRLSDYDVDA IVPQSFLKDD | |
| | SIDAKVLTRS DKARGKSDNV PSEEVVKKMK NYWRQLLNAK LITQRKFDNL | |
| | TKAERGGLSE LDKAGFIKRQ LVETRQITKH VAQILDSRMN TKYDENDKLI | |
| | REVKVITLKS KLVSDFRKDF QFYKVREINN YHHAHAAYLN AVVGTALIKK | |
| | YPKLESEFVY GDYKVYDVRK MIAKSEQEIG KATAKYFFYS NIMNFFKTEI | |
| | TLANGEIRKR PLIETNGETG EIVWDKGRDF ATVRKVLSMP QVNIVKKTEV | |
| | QTGGFSKESI LPKRNSDKLI ARKKDWDPKK YGGFDSPTVA YSVLVVAKVE | |
| | KGKSKKLKSV KELLGITIME RSSFEKNPID FLEAKGYKEV KKDLIIKLPK | |
| | YSLFELENGR KRMLASAGEL QKGNELALPS KYVNFLYLAS HYEKLKGSPE | |
| | DNEQKQLFVE QHKHYLDEII EQISEFSKRV ILADANLDKV LSAYNKHRDK | |
| | PIREQAENII HLFTLTNLGA PAAFKYFDTT IDRKRYTSTK EVLDATLIHQ | |
| | SITGLYETRI DLSQLGGD | |
| AJN60013.1 | MTQSERRFSC SIGIDMGAKY TGVFYALFDR EELPTNLNSK AMTLVMPETG | (SEQ |
| GI: 757015969 | PRYVQAQRTA VRHRLRGQKR YTLARKLAFL VVDDMIKKQE KRLTDEEWKR | ID NO: |
| WP_ | GREALSGLLK RRGYSRPNAD GEDLTPLENV RADVFAAHPA FSTYFSEVRS | 33) |
| 005430658.1 | LAEQWEEFTA NISNVEKFLG DPNIPADKEF IEFAVAEGLI DKTEKKAYQS | |
| Sutterella | ALSTLRANAN VLTGLRQMGH KPRSEYFKAI EADLKKDSRL AKINEAFGGA | |
| wadsworthensis | ERLARLLGNL SNLQLRAERW YFNAPDIMKD RGWEPDRFKK TLVRAFKFFH | |
| 3_1_45B | PAKDQNKQHL ELIKQIENSE DIIETLCTLD PNRTIPPYED QNNRRPPLDQ | |
| | TLLLSPEKLT RQYGEIWKTW SARLTSAEPT LAPAAEILER STDRKSRVAV | |
| | NGHEPLPTLA YQLSYALQRA FDRSKALDPY ALRALAAGSK SNKLTSARTA | |
| | LENCIGGQNV KTFLDCARRY YREADDAKVG LWFDNADGLL ERSDLHPPMK | |
| | KKILPLLVAN ILQTDETTGQ KFLDEIWRKQ IKGRETVASR CARIETVRKS | |
| | FGGGFNIAYN TAQYREVNKL PRNAQDKELL TIRDRVAETA DFIAANLGLS | |
| | DEQKRKFANP FSLAQFYTLI ETEVSGFSAT TLAVHLENAW RMTIKDAVIN | |
| | GETVRAAQCS RLPAETARPF DGLVRRLVDR QAWEIAKRVS TDIQSKVDFS | |
| | NGIVDVSIFV EENKFEFSAS VADLKKNKRV KDKMLSEAEK LETRWLIKNE | |
| | RIKKASRGTC PYTGDRLAEG GEIDHILPRS LIKDARGIVE NAEPNLIYAS | |
| | SRGNQLKKNQ RYSLSDLKAN YRNEIFKTSN IAAITAEIED VVTKLQQTHR | |
| | LKFFDLLNEH EQDCVRHALF LDDGSEARDA VLELLATQRR TRVNGTQIWM | |
| | IKNLANKIRE ELQNWCKTTN NRLHFQAAAT NVSDAKNLRL KLAQNQPDFE | |
| | KPDIQPIASH SIDALCSFAV GSADAERDQN GFDYLDGKTV LGLYPQSCEV | |
| | IHLQAKPQEE KSHFDSVAIF KEGIYAEQFL PIFTLNEKIW IGYETLNAKG | |
| | ERCGAIEVSG KQPKELLEML APFFNKPVGD LSAHATYRIL KKPAYEFLAK | |
| | AALQPLSAEE KRLAALLDAL RYCTSRKSLM SLFMAANGKS LKKREDVLKP | |
| | KLFQLKVELK GEKSFKLNGS LTLPVKQDWL RICDSPELAD AFGKPCSADE | |
| | LTSKLARIWK RPVMRDLAHA PVRREFSLPA IDNPSGGFRI RRTNLFGNEL | |
| | YQVHAINAKK YRGFASAGSN VDWSKGILFN ELQHENLTEC GGRFITSADV | |
| | TPMSEWRKVV AEDNLSIWIA PGTEGRRYVR VETTFIQASH WFEQSVENWA | |
| | ITSPLSLPAS FKVDKPAEFQ KAVGTELSEL LGQPRSEIFI ENVGNAKHIR | |
| | FWYIVVSSNK KMNESYNNVS KS | |
| AJN60014.1 | MESSQILSPI GIDLGGKFTG VCLSHLEAFA ELPNHANTKY SVILIDHNNF | (SEQ |
| GI: 757015970 | QLSQAQRRAT RHRVRNKKRN QFVKRVALQL FQHILSRDLN AKEETALCHY | ID NO: |
| WP_01121279 | LNNRGYTYVD TDLDEYIKDE TTINLLKELL PSESEHNFID WFLQKMQSSE | 34) |
| 2.1 | FRKILVSKVE EKKDDKELKN AVKNIKNFIT GFEKNSVEGH RHRKVYFENI | |
| Legionella | KSDITKDNQL DSIKKKIPSV CLSNLLGHLS NLQWKNLHRY LAKNPKQFDE | |
| pneumophila | QTFGNEFLRM LKNFRHLKGS QESLAVRNLI QQLEQSQDYI SILEKTPPEI | |
| str. Paris | TIPPYEARTN TGMEKDQSLL LNPEKLNNLY PNWRNLIPGI IDAHPFLEKD | |
| | LEHTKLRDRK RIISPSKQDE KRDSYILQRY LDLNKKIDKF KIKKQLSFLG | |
| | QGKQLPANLI ETQKEMETHF NSSLVSVLIQ IASAYNKERE DAAQGIWFDN | |
| | AFSLCELSNI NPPRKQKILP LLVGAILSED FINNKDKWAK FKIFWNTHKI | |
| | GRTSLKSKCK EIEEARKNSG NAFKIDYEEA LNHPEHSNNK ALIKIIQTIP | |
| | DIIQAIQSHL GHNDSQALIY HNPFSLSQLY TILETKRDGF HKNCVAVTCE | |
| | NYWRSQKTEI DPEISYASRL PADSVRPFDG VLARMMQRLA YEIAMAKWEQ | |
| | IKHIPDNSSL LIPIYLEQNR FEFEESFKKI KGSSSDKTLE QAIEKQNIQW | |
| | EEKFQRIINA SMNICPYKGA SIGGQGEIDH IYPRSLSKKH FGVIFNSEVN | |
| | LIYCSSQGNR EKKEEHYLLE HLSPLYLKHQ FGTDNVSDIK NFISQNVANI | |
| | KKYISFHLLT PEQQKAARHA LFLDYDDEAF KTITKFLMSQ QKARVNGTQK | |
| | FLGKQIMEFL STLADSKQLQ LEFSIKQITA EEVHDHRELL SKQEPKLVKS | |
| | RQQSFPSHAI DATLTMSIGL KEFPQFSQEL DNSWFINHLM PDEVHLNPVR | |
| | SKEKYNKPNI SSTPLFKDSL YAERFIPVWV KGETFAIGFS EKDLFEIKPS | |
| | NKEKLFTLLK TYSTKNPGES LQELQAKSKA KWLYFPINKT LALEFLHHYF | |
| | HKEIVTPDDT TVCHFINSLR YYTKKESITV KILKEPMPVL SVKFESSKKN | |
| | VLGSFKHTIA LPATKDWERL FNHPNFLALK ANPAPNPKEF NEFIRKYFLS | |
| | DNNPNSDIPN NGHNIKPQKH KAVRKVFSLP VIPGNAGTMM RIRRKDNKGQ | |
| | PLYQLQTIDD TPSMGIQINE DRLVKQEVLM DAYKTRNLST IDGINNSEGQ | |
| | AYATFDNWLT LPVSTFKPEI IKLEMKPHSK TRRYIRITQS LADFIKTIDE | |
| | ALMIKPSDSI DDPLNMPNEI VCKNKLFGNE LKPRDGKMKI VSTGKIVTYE | |
| | FESDSTPQWI QTLYVTQLKK QP | |
| AJN60015.1 | MKKEIKDYFL GLDVGTGSVG WAVTDTDYKL LKANRKDLWG MRCFETAETA | (SEQ |
| GI: 757015971 | EVRRLHRGAR RRIERRKKRI KLLQELFSQE IAKTDEGFFQ RMKESPFYAE | ID NO: |
| WP_00268128 | DKTILQENTL FNDKDFADKT YHKAYPTINH LIKAWIENKV KPDPRLLYLA | 35) |
| 9.1 | CHNIIKKRGH FLFEGDFDSE NQFDTSIQAL FEYLREDMEV DIDADSQKVK | |
| Treponema | EILKDSSLKN SEKQSRLNKI LGLKPSDKQK KAITNLISGN KINFADLYDN | |
| denticola | PDLKDAEKNS ISFSKDDFDA LSDDLASILG DSFELLLKAK AVYNCSVLSK | |
| ATCC 35405 | VIGDEQYLSF AKVKIYEKHK TDLTKLKNVI KKHFPKDYKK VFGYNKNEKN | |
| | NNNYSGYVGV CKTKSKKLII NNSVNQEDFY KFLKTILSAK SEIKEVNDIL | |
| | TEIETGTFLP KQISKSNAEI PYQLRKMELE KILSNAEKHF SFLKQKDEKG | |
| | LSHSEKIIML LTFKIPYYIG PINDNHKKFF PDRCWVVKKE KSPSGKTTPW | |
| | NFFDHIDKEK TAEAFITSRT NFCTYLVGES VLPKSSLLYS EYTVLNEINN | |
| | LQIIIDGKNI CDIKLKQKIY EDLFKKYKKI TQKQISTFIK HEGICNKTDE | |
| | VIILGIDKEC TSSLKSYIEL KNIFGKQVDE ISTKNMLEEI IRWATIYDEG | |
| | EGKTILKTKI KAEYGKYCSD EQIKKILNLK FSGWGRLSRK FLETVTSEMP | |
| | GFSEPVNIIT AMRETQNNLM ELLSSEFTFT ENIKKINSGF EDAEKQFSYD | |
| | GLVKPLFLSP SVKKMLWQTL KLVKEISHIT QAPPKKIFIE MAKGAELEPA | |
| | RTKTRLKILQ DLYNNCKNDA DAFSSEIKDL SGKIENEDNL RLRSDKLYLY | |
| | YTQLGKCMYC GKPIEIGHVF DTSNYDIDHI YPQSKIKDDS ISNRVLVCSS | |
| | CNKNKEDKYP LKSEIQSKQR GFWNFLQRNN FISLEKLNRL TRATPISDDE | |
| | TAKFIARQLV ETRQATKVAA KVLEKMFPET KIVYSKAETV SMFRNKFDIV | |
| | KCREINDFHH AHDAYLNIVV GNVYNTKFTN NPWNFIKEKR DNPKIADTYN | |
| | YYKVFDYDVK RNNITAWEKG KTIITVKDML KRNTPIYTRQ AACKKGELFN | |
| | QTIMKKGLGQ HPLKKEGPFS NISKYGGYNK VSAAYYTLIE YEEKGNKIRS | |
| | LETIPLYLVK DIQKDQDVLK SYLTDLLGKK EFKILVPKIK INSLLKINGF | |
| | PCHITGKTND SFLLRPAVQF CCSNNEVLYF KKIIRFSEIR SQREKIGKTI | |
| | SPYEDLSFRS YIKENLWKKT KNDEIGEKEF YDLLQKKNLE IYDMLLTKHK | |
| | DTIYKKRPNS ATIDILVKGK EKFKSLIIEN QFEVILEILK LFSATRNVSD | |
| | LQHIGGSKYS GVAKIGNKIS SLDNCILIYQ SITGIFEKRI DLLKV | |
| AJN60016.1 | MTKEYYLGLD VGTNSVGWAV TDSQYNLCKF KKKDMWGIRL FESANTAKDR | (SEQ |
| GI: 757015972 | RLQRGNRRRL ERKKQRIDLL QEIFSPEICK IDPTFFIRLN ESRLHLEDKS | ID NO: |
| EFE28295.1 | NDFKYPLFIE KDYSDIEYYK EFPTIFHLRK HLIESEEKQD IRLIYLALHN | 36) |
| Filifactor alocis | IIKTRGHFLI DGDLQSAKQL RPILDTFLLS LQEEQNLSVS LSENQKDEYE | |
| ATCC 35896 | EILKNRSIAK SEKVKKLKNL FEISDELEKE EKKAQSAVIE NFCKFIVGNK | |
| | GDVCKFLRVS KEELEIDSFS FSEGKYEDDI VKNLEEKVPE KVYLFEQMKA | |
| | MYDWNILVDI LETEEYISFA KVKQYEKHKT NLRLLRDIIL KYCTKDEYNR | |
| | MFNDEKEAGS YTAYVGKLKK NNKKYWIEKK RNPEEFYKSL GKLLDKIEPL | |
| | KEDLEVLTMM IEECKNHTLL PIQKNKDNGV IPHQVHEVEL KKILENAKKY | |
| | YSFLTETDKD GYSVVQKIES IFRFRIPYYV GPLSTRHQEK GSNVWMVRKP | |
| | GREDRIYPWN MEEIIDFEKS NENFITRMTN KCTYLIGEDV LPKHSLLYSK | |
| | YMVLNELNNV KVRGKKLPTS LKQKVFEDLF ENKSKVTGKN LLEYLQIQDK | |
| | DIQIDDLSGF DKDFKTSLKS YLDFKKQIFG EEIEKESIQN MIEDIIKWIT | |
| | IYGNDKEMLK RVIRANYSNQ LTEEQMKKIT GFQYSGWGNF SKMFLKGISG | |
| | SDVSTGETFD IITAMWETDN NLMQILSKKF TFMDNVEDFN SGKVGKIDKI | |
| | TYDSTVKEMF LSPENKRAVW QTIQVAEEIK KVMGCEPKKI FIEMARGGEK | |
| | VKKRTKSRKA QLLELYAACE EDCRELIKEI EDRDERDFNS MKLFLYYTQF | |
| | GKCMYSGDDI DINELIRGNS KWDRDHIYPQ SKIKDDSIDN LVLVNKTYNA | |
| | KKSNELLSED IQKKMHSFWL SLLNKKLITK SKYDRLTRKG DFTDEELSGF | |
| | IARQLVETRQ STKAIADIFK QIYSSEVVYV KSSLVSDFRK KPLNYLKSRR | |
| | VNDYHHAKDA YLNIVVGNVY NKKFTSNPIQ WMKKNRDTNY SLNKVFEHDV | |
| | VINGEVIWEK CTYHEDTNTY DGGTLDRIRK IVERDNILYT EYAYCEKGEL | |
| | FNATIQNKNG NSTVSLKKGL DVKKYGGYFS ANTSYFSLIE FEDKKGDRAR | |
| | HIIGVPIYIA NMLEHSPSAF LEYCEQKGYQ NVRILVEKIK KNSLLIINGY | |
| | PLRIRGENEV DTSFKRAIQL KLDQKNYELV RNIEKFLEKY VEKKGNYPID | |
| | ENRDHITHEK MNQLYEVLLS KMKKFNKKGM ADPSDRIEKS KPKFIKLEDL | |
| | IDKINVINKM LNLLRCDNDT KADLSLIELP KNAGSFVVKK NTIGKSKIIL | |
| | VNQSVTGLYE NRREL | |
| AJN60017.1 | MGRKPYILSL DIGTGSVGYA CMDKGFNVLK YHDKDALGVY LFDGALTAQE | (SEQ |
| GI: 757015973 | RRQFRTSRRR KNRRIKRLGL LQELLAPLVQ NPNFYQFQRQ FAWKNDNMDF | ID NO: |
| WP_01461325 | KNKSLSEVLS FLGYESKKYP TIYHLQEALL LKDEKFDPEL IYMALYHLVK | 37) |
| 9.1 | YRGHFLFDHL KIENLTNNDN MHDFVELIET YENLNNIKLN LDYEKTKVIY | |
| Staphylococcus | EILKDNEMTK NDRAKRVKNM EKKLEQFSIM LLGLKFNEGK LFNHADNAEE | |
| pseudintermedius | LKGANQSHTF ADNYEENLTP FLTVEQSEFI ERANKIYLSL TLQDILKGKK | |
| ED99 | SMAMSKVAAY DKFRNELKQV KDIVYKADST RTQFKKIFVS SKKSLKQYDA | |
| | TPNDQTFSSL CLFDQYLIRP KKQYSLLIKE LKKIIPQDSE LYFEAENDTL | |
| | LKVLNTTDNA SIPMQINLYE AETILRNQQK YHAEITDEMI EKVLSLIQFR | |
| | IPYYVGPLVN DHTASKFGWM ERKSNESIKP WNFDEVVDRS KSATQFIRRM | |
| | TNKCSYLINE DVLPKNSLLY QEMEVLNELN ATQIRLQTDP KNRKYRMMPQ | |
| | IKLFAVEHIF KKYKTVSHSK FLEIMLNSNH RENFMNHGEK LSIFGTQDDK | |
| | KFASKLSSYQ DMTKIFGDIE GKRAQIEEII QWITIFEDKK ILVQKLKECY | |
| | PELTSKQINQ LKKLNYSGWG RLSEKLLTHA YQGHSIIELL RHSDENFMEI | |
| | LTNDVYGFQN FIKEENQVQS NKIQHQDIAN LTTSPALKKG IWSTIKLVRE | |
| | LTSIFGEPEK IIMEFATEDQ QKGKKQKSRK QLWDDNIKKN KLKSVDEYKY | |
| | IIDVANKLNN EQLQQEKLWL YLSQNGKCMY SGQSIDLDAL LSPNATKHYE | |
| | VDHIFPRSFI KDDSIDNKVL VIKKMNQTKG DQVPLQFIQQ PYERIAYWKS | |
| | LNKAGLISDS KLHKLMKPEF TAMDKEGFIQ RQLVETRQIS VHVRDFLKEE | |
| | YPNTKVIPMK AKMVSEFRKK FDIPKIRQMN DAHHAIDAYL NGVVYHGAQL | |
| | AYPNVDLFDF NFKWEKVREK WKALGEFNTK QKSRELFFFK KLEKMEVSQG | |
| | ERLISKIKLD MNHFKINYSR KLANIPQQFY NQTAVSPKTA ELKYESNKSN | |
| | EVVYKGLTPY QTYVVAIKSV NKKGKEKMEY QMIDHYVFDF YKFQNGNEKE | |
| | LALYLAQREN KDEVLDAQIV YSLNKGDLLY INNHPCYFVS RKEVINAKQF | |
| | ELTVEQQLSL YNVMNNKETN VEKLLIEYDF IAEKVINEYH HYLNSKLKEK | |
| | RVRTFFSESN QTHEDFIKAL DELFKVVTAS ATRSDKIGSR KNSMTHRAFL | |
| | GKGKDVKIAY TSISGLKTTK PKSLFKLAES RNEL | |
| AJN60018.1 | MTKIKDDYIV GLDIGTDSCG WVAMNSNNDI LKLQGKTAIG SRLFEGGKSA | (SEQ |
| GI: 757015974 | AERRLFRTTH RRIKRRRWRL KLLEEFFDPY MAEVDPYFFA RLKESGLSPL | ID NO: |
| WP_01456756 | DKRKTVSSIV FPTSAEDKKF YDDYPTIYHL RYKLMTEDEK FDLREVYLAI | 38) |
| 1.1 | HHIIKYRGNF LYNTSVKDFK ASKIDVKSSI EKLNELYENL GLDLNVEFNI | |
| Lactobacillus | SNTAEIEKVL KDKQIFKRDK VKKIAELFAI KTDNKEQSKR IKDISKQVAN | |
| johnsonii DPC | AVLGYKTRFD TIALKEISKD ELSDWNFKLS DIDADSKFEA LMGNLDENEQ | |
| 6026 | AILLTIKELF NEVTLNGIVE DGNTLSESMI NKYNDHRDDL KLLKEVIENH | |
| | IDRKKAKELA LAYDLYVNNR HGQLLQAKKK LGKIKPRSKE DFYKVVNKNL | |
| | DDSRASKEIK KKIELDSFMP KQRTNANGVI PYQLQQLELD KIIENQSKYY | |
| | PFLKEINPVS SHLKEAPYKL DELIRFRVPY YVGPLISPNE STKDIQTKKN | |
| | QNFAWMIRKE EGRITPWNFD QKVDRIESAN KFIKRMTTKD TYLFGEDVLP | |
| | ANSLLYQKFT VLNELNNIRI NGKRISVDLK QEIYENLFKK HTTVTVKKLE | |
| | NYLKENHNLV KVEIKGLADE KKENSGLTTY NRFKNLNIFD NQIDDLKYRN | |
| | DFEKIIEWST IFEDKSIYKE KLRSIDWLNE KQINALSNIR LQGWGRLSKK | |
| | LLAQLHDHNG QTIIEQLWDS QNNFMQIVTQ ADFKDAIAKA NQNLLVATSV | |
| | EDILNNAYTS PANKKAIRQV IKVVDDIVKA ASGKVPKQIA IEFTRDADEN | |
| | PKRSQTRGSK LQKVYKDLST ELASKTIAEE LNEAIKDKKL VQDKYYLYFM | |
| | QLGRDAYTGE PINIDEIQKY DIDHILPQSF IKDDALDNRV LVSRAVNNGK | |
| | SDNVPVKLFG NEMAANLGMT IRKMWEEWKN IGLISKTKYN NLLTDPDHIN | |
| | KYKSAGFIRR QLVETSQIIK LVSTILQSRY PNTEIITVKA KYNHYLREKF | |
| | DLYKSREVND YHHAIDAYLS AICGNLLYQN YPNLRPFFVY GQYKKFSSDP | |
| | DKEKAIFNKT RKFSFISQLL KNKSENSKEI AKKLKRAYQF KYMLVSRETE | |
| | TRDQEMFKMT VYPRFSHDTV KAPRNLIPKK MGMSPDIYGG YTNNSDAYMV | |
| | IVRIDKKKGT EYKILGIPTR ELVNLKKAEK EDHYKSYLKE ILTPRILYNK | |
| | NGKRDKKITS FEIVKSKIPY KQVIQDGDKK FMLGSSTYVY NAKQLTLSTE | |
| | SMKAITNNFD KDSDENDALI KAYDEILDKV DKYLPLFDIN KFREKLHSGR | |
| | EKFIKLSLED KKDTILKVLE GLHDNAVMTK IPTIGLSTPL GFMQFPNGVI | |
| | LSENAKLIYQ SPTGLFKKSV KISDL | |
| Mycoplasma | MNNSIKSKPE VTIGLDLGVG SVGWAIVDNE TNIIHHLGSR LFSQAKTAED | (SEQ |
| gallisepticum | RRSFRGVRRL IRRRKYKLKR FVNLIWKYNS YFGFKNKEDI LNNYQEQQKL | ID NO: |
| str. F | HNTVLNLKSE ALNAKIDPKA LSWILHDYLK NRGHFYEDNR DFNVYPTKEL | 39) |
| AJN60022.1 | AKYFDKYGYY KGIIDSKEDN DNKLEEELTK YKFSNKHWLE EVKKVLSNQT | |
| GI: 757015978 | GLPEKFKEEY ESLFSYVRNY SEGPGSINSV SPYGIYHLDE KEGKVVQKYN | |
| WP_ | NIWDKTIGKC NIFPDEYRAP KNSPIAMIFN EINELSTIRS YSIYLTGWFI | |
| 014574789.1 | NQEFKKAYLN KLLDLLIKTN GEKPIDARQF KKLREETIAE SIGKETLKDV | |
| | ENEEKLEKED HKWKLKGLKL NTNGKIQYND LSSLAKFVHK LKQHLKLDFL | |
| | LEDQYATLDK INFLQSLFVY LGKHLRYSNR VDSANLKEFS DSNKLFERIL | |
| | QKQKDGLFKL FEQTDKDDEK ILAQTHSLST KAMLLAITRM TNLDNDEDNQ | |
| | KNNDKGWNFE AIKNFDQKFI DITKKNNNLS LKQNKRYLDD RFINDAILSP | |
| | GVKRILREAT KVFNAILKQF SEEYDVTKVV IELARELSEE KELENTKNYK | |
| | KLIKKNGDKI SEGLKALGIS EDEIKDILKS PTKSYKFLLW LQQDHIDPYS | |
| | LKEIAFDDIF TKTEKFEIDH IIPYSISFDD SSSNKLLVLA ESNQAKSNQT | |
| | PYEFISSGNA GIKWEDYEAY CRKFKDGDSS LLDSTQRSKK FAKMMKTDTS | |
| | SKYDIGFLAR NLNDTRYATI VFRDALEDYA NNHLVEDKPM FKVVCINGSV | |
| | TSFLRKNFDD SSYAKKDRDK NIHHAVDASI ISIFSNETKT LFNQLTQFAD | |
| | YKLFKNTDGS WKKIDPKTGV VTEVTDENWK QIRVRNQVSE IAKVIEKYIQ | |
| | DSNIERKARY SRKIENKTNI SLFNDTVYSA KKVGYEDQIK RKNLKTLDIH | |
| | ESAKENKNSK VKRQFVYRKL VNVSLLNNDK LADLFAEKED ILMYRANPWV | |
| | INLAEQIFNE YTENKKIKSQ NVFEKYMLDL TKEFPEKFSE FLVKSMLRNK | |
| | TAIIYDDKKN IVHRIKRLKM LSSELKENKL SNVIIRSKNQ SGTKLSYQDT | |
| | INSLALMIMR SIDPTAKKQY IRVPLNTLNL HLGDHDFDLH NMDAYLKKPK | |
| | FVKYLKANEI GDEYKPWRVL TSGTLLIHKK DKKLMYISSF QNLNDVIEIK | |
| | NLIETEYKEN DDSDSKKKKK ANRFLMTLST ILNDYILLDA KDNFDILGLS | |
| | KNRIDEILNS KLGLDKIVK | |
| AJN60023.1 | MRILGFDIGI NSIGWAFVEN DELKDCGVRI FTKAENPKNK ESLALPRRNA | (SEQ |
| GI: 757015979 | RSSRRRLKRR KARLIAIKRI LAKELKLNYK DYVAADGELP KAYEGSLASV | ID NO: |
| | YELRYKALTQ NLETKDLARV ILHIAKHRGY MNKNEKKSND AKKGKILSAL | 430) |
| | KNNALKLENY QSVGEYFYKE FFQKYKKNTK NFIKIRNTKD NYNNCVLSSD | |
| | LEKELKLILE KQKEFGYNYS EDFINEILKV AFFQRPLKDF SHLVGACTFF | |
| | EEEKRACKNS YSAWEFVALT KIINEIKSLE KISGEIVPTQ TINEVLNLIL | |
| | DKGSITYKKF RSCINLHESI SFKSLKYDKE NAENAKLIDF RKLVEFKKAL | |
| | GVHSLSRQEL DQISTHITLI KDNVKLKTVL EKYNLSNEQI NNLLEIEFND | |
| | YINLSFKALG MILPLMREGK RYDEACEIAN LKPKTVDEKK DFLPAFCDSI | |
| | FAHELSNPVV NRAISEYRKV LNALLKKYGK VHKIHLELAR DVGLSKKARE | |
| | KIEKEQKENQ AVNAWALKEC ENIGLKASAK NILKLKLWKE QKEICIYSGN | |
| | KISIEHLKDE KALEVDHIYP YSRSFDDSFI NKVLVFTKEN QEKLNKTPFE | |
| | AFGKNIEKWS KIQTLAQNLP YKKKNKILDE NFKDKQQEDF ISRNLNDTRY | |
| | IATLIAKYTK EYLNFLLLSE NENANLKSGE KGSKIHVQTI SGMLTSVLRH | |
| | TWGFDKKDRN NHLHHALDAI IVAYSTNSII KAFSDFRKNQ ELLKARFYAK | |
| | ELTSDNYKHQ VKFFEPFKSF REKILSKIDE IFVSKPPRKR ARRALHKDTF | |
| | HSENKIIDKC SYNSKEGLQI ALSCGRVRKI GTKYVENDTI VRVDIFKKQN | |
| | KFYAIPIYAM DFALGILPNK IVITGKDKNN NPKQWQTIDE SYEFCFSLYK | |
| | NDLILLQKKN MQEPEFAYYN DFSISTSSIC VEKHDNKFEN LTSNQKLLFS | |
| | NAKEGSVKVE SLGIQNLKVF EKYIITPLGD KIKADFQPRE NISLKTSKKY | |
| | GLR | |
| AJN60025.1 | MSDLVLGLDI GIGSVGVGIL NKVTGEIIHK NSRIFPAAQA ENNLVRRTNR | (SEQ |
| GI: 757015981 | QGRRLARRKK HRRVRLNRLF EESGLITDFT KISINLNPYQ LRVKGLTDEL | ID NO: |
| | SNEELFIALK NMVKHRGISY LDDASDDGNS SVGDYAQIVK ENSKQLETKT | 41) |
| | PGQIQLERYQ TYGQLRGDFT VEKDGKKHRL INVFPTSAYR SEALRILQTQ | |
| | QEFNPQITDE FINRYLEILT GKRKYYHGPG NEKSRTDYGR YRTSGETLDN | |
| | IFGILIGKCT FYPDEFRAAK ASYTAQEFNL LNDLNNLTVP TETKKLSKEQ | |
| | KNQIINYVKN EKAMGPAKLF KYIAKLLSCD VADIKGYRID KSGKAEIHTF | |
| | EAYRKMKTLE TLDIEQMDRE TLDKLAYVLT LNTEREGIQE ALEHEFADGS | |
| | FSQKQVDELV QFRKANSSIF GKGWHNFSVK LMMELIPELY ETSEEQMTIL | |
| | TRLGKQKTTS SSNKTKYIDE KLLTEEIYNP VVAKSVRQAI KIVNAAIKEY | |
| | GDFDNIVIEM ARETNEDDEK KAIQKIQKAN KDEKDAAMLK AANQYNGKAE | |
| | LPHSVFHGHK QLATKIRLWH QQGERCLYTG KTISIHDLIN NSNQFEVDHI | |
| | LPLSITFDDS LANKVLVYAT ANQEKGQRTP YQALDSMDDA WSFRELKAFV | |
| | RESKTLSNKK KEYLLTEEDI SKFDVRKKFI ERNLVDTRYA SRVVLNALQE | |
| | HFRAHKIDTK VSVVRGQFTS QLRRHWGIEK TRDTYHHHAV DALIIAASSQ | |
| | LNLWKKQKNT LVSYSEDQLL DIETGELISD DEYKESVFKA PYQHFVDTLK | |
| | SKEFEDSILF SYQVDSKFNR KISDATIYAT RQAKVGKDKA DETYVLGKIK | |
| | DIYTQDGYDA FMKIYKKDKS KFLMYRHDPQ TFEKVIEPIL ENYPNKQINE | |
| | KGKEVPCNPF LKYKEEHGYI RKYSKKGNGP EIKSLKYYDS KLGNHIDITP | |
| | KDSNNKVVLQ SVSPWRADVY FNKTTGKYEI LGLKYADLQF EKGTGTYKIS | |
| | QEKYNDIKKK EGVDSDSEFK FTLYKNDLLL VKDTETKEQQ LFRFLSRTMP | |
| | KQKHYVELKP YDKQKFEGGE ALIKVLGNVA NSGQCKKGLG KSNISIYKVR | |
| | TDVLGNQHII KNEGDKPKLM | |
| WP_00266404 | MKHILGLDLG TNSIGWALIE RNIEEKYGKI IGMGSRIVPM GAELSKFEQG | (SEQ |
| 8.1 | QAQTKNADRR TNRGARRLNK RYKQRRNKLI YILQKLDMLP SQIKLKEDFS | ID NO: |
| Bergeyella | DPNKIDKITI LPISKKQEQL TAFDLVSLRV KALTEKVGLE DLGKIIYKYN | 42) |
| zoohelcum | QLRGYAGGSL EPEKEDIFDE EQSKDKKNKS FIAFSKIVFL GEPQEEIFKN | |
| ATCC 43767 | KKLNRRAIIV ETEEGNFEGS TFLENIKVGD SLELLINISA SKSGDTITIK | |
| | LPNKTNWRKK MENIENQLKE KSKEMGREFY ISEFLLELLK ENRWAKIRNN | |
| | TILRARYESE FEAIWNEQVK HYPFLENLDK KTLIEIVSFI FPGEKESQKK | |
| | YRELGLEKGL KYIIKNQVVF YQRELKDQSH LISDCRYEPN EKAIAKSHPV | |
| | FQEYKVWEQI NKLIVNTKIE AGTNRKGEKK YKYIDRPIPT ALKEWIFEEL | |
| | QNKKEITFSA IFKKLKAEFD LREGIDFLNG MSPKDKLKGN ETKLQLQKSL | |
| | GELWDVLGLD SINRQIELWN ILYNEKGNEY DLTSDRTSKV LEFINKYGNN | |
| | IVDDNAEETA IRISKIKFAR AYSSLSLKAV ERILPLVRAG KYFNNDFSQQ | |
| | LQSKILKLLN ENVEDPFAKA AQTYLDNNQS VLSEGGVGNS IATILVYDKH | |
| | TAKEYSHDEL YKSYKEINLL KQGDLRNPLV EQIINEALVL IRDIWKNYGI | |
| | KPNEIRVELA RDLKNSAKER ATIHKRNKDN QTINNKIKET LVKNKKELSL | |
| | ANIEKVKLWE AQRHLSPYTG QPIPLSDLFD KEKYDVDHII PISRYFDDSF | |
| | TNKVISEKSV NQEKANRTAM EYFEVGSLKY SIFTKEQFIA HVNEYFSGVK | |
| | RKNLLATSIP EDPVQRQIKD TQYIAIRVKE ELNKIVGNEN VKTTTGSITD | |
| | YLRNHWGLTD KFKLLLKERY EALLESEKFL EAEYDNYKKD FDSRKKEYEE | |
| | KEVLFEEQEL TREEFIKEYK ENYIRYKKNK LIIKGWSKRI DHRHHAIDAL | |
| | IVACTEPAHI KRLNDLNKVL QDWLVEHKSE FMPNFEGSNS ELLEEILSLP | |
| | ENERTEIFTQ IEKFRAIEMP WKGFPEQVEQ KLKEIIISHK PKDKLLLQYN | |
| | KAGDRQIKLR GQLHEGTLYG ISQGKEAYRI PLTKFGGSKF ATEKNIQKIV | |
| | SPFLSGFIAN HLKEYNNKKE EAFSAEGIMD LNNKLAQYRN EKGELKPHTP | |
| | ISTVKIYYKD PSKNKKKKDE EDLSLQKLDR EKAFNEKLYV KTGDNYLFAV | |
| | LEGEIKTKKT SQIKRLYDII SFFDATNFLK EEFRNAPDKK TFDKDLLFRQ | |
| | YFEERNKAKL LFTLKQGDFV YLPNENEEVI LDKESPLYNQ YWGDLKERGK | |
| | NIYVVQKFSK KQIYFIKHTI ADIIKKDVEF GSQNCYETVE GRSIKENCFK | |
| | LEIDRLGNIV KVIKR | |
| CBK78998.1 | MKQEYFLGLD MGTGSLGWAV TDSTYQVMRK HGKALWGTRL FESASTAEER | (SEQ |
| Coprococcus | RMFRTARRRL DRRNWRIQVL QEIFSEEISK VDPGFFLRMK ESKYYPEDKR | ID NO: |
| catus GD/7 | DAEGNCPELP YALFVDDNYT DKNYHKDYPT IYHLRKMLME TTEIPDIRLV | 43) |
| | YLVLHHMMKH RGHFLLSGDI SQIKEFKSTF EQLIQNIQDE ELEWHISLDD | |
| | AAIQFVEHVL KDRNLTRSTK KSRLIKQLNA KSACEKAILN LLSGGTVKLS | |
| | DIFNNKELDE SERPKVSFAD SGYDDYIGIV EAELAEQYYI IASAKAVYDW | |
| | SVLVEILGNS VSISEAKIKV YQKHQADLKT LKKIVRQYMT KEDYKRVFVD | |
| | TEEKLNNYSA YIGMTKKNGK KVDLKSKQCT QADFYDFLKK NVIKVIDHKE | |
| | ITQEIESEIE KENFLPKQVT KDNGVIPYQV HDYELKKILD NLGTRMPFIK | |
| | ENAEKIQQLF EFRIPYYVGP LNRVDDGKDG KFTWSVRKSD ARIYPWNFTE | |
| | VIDVEASAEK FIRRMTNKCT YLVGEDVLPK DSLVYSKFMV LNELNNLRLN | |
| | GEKISVELKQ RIYEELFCKY RKVTRKKLER YLVIEGIAKK GVEITGIDGD | |
| | FKASLTAYHD FKERLTDVQL SQRAKEAIVL NVVLFGDDKK LLKQRLSKMY | |
| | PNLTTGQLKG ICSLSYQGWG RLSKTFLEEI TVPAPGTGEV WNIMTALWQT | |
| | NDNLMQLLSR NYGFTNEVEE FNTLKKETDL SYKTVDELYV SPAVKRQIWQ | |
| | TLKVVKEIQK VMGNAPKRVF VEMAREKQEG KRSDSRKKQL VELYRACKNE | |
| | ERDWITELNA QSDQQLRSDK LFLYYIQKGR CMYSGETIQL DELWDNTKYD | |
| | IDHIYPQSKT MDDSLNNRVL VKKNYNAIKS DTYPLSLDIQ KKMMSFWKML | |
| | QQQGFITKEK YVRLVRSDEL SADELAGFIE RQIVETRQST KAVATILKEA | |
| | LPDTEIVYVK AGNVSNFRQT YELLKVREMN DLHHAKDAYL NIVVGNAYFV | |
| | KFTKNAAWFI RNNPGRSYNL KRMFEFDIER SGEIAWKAGN KGSIVTVKKV | |
| | MQKNNILVTR KAYEVKGGLF DQQIMKKGKG QVPIKGNDER LADIEKYGGY | |
| | NKAAGTYFML VKSLDKKGKE IRTIEFVPLY LKNQIEINHE SAIQYLAQER | |
| | GLNSPEILLS KIKIDTLFKV DGFKMWLSGR TGNQLIFKGA NQLILSHQEA | |
| | AILKGVVKYV NRKNENKDAK LSERDGMTEE KLLQLYDTFL DKLSNTVYSI | |
| | RLSAQIKTLT EKRAKFIGLS NEDQCIVLNE ILHMFQCQSG SANLKLIGGP | |
| | GSAGILVMNN NITACKQISV INQSPTGIYE KEIDLIKL | |
| WP_00223516 | MAAFKPNPIN YILGLDIGIA SVGWAMVEID EDENPICLID LGVRVFERAE | (SEQ |
| 2.1 | VPKTGDSLAM ARRLARSVRR LTRRRAHRLL RARRLLKREG VLQAADFDEN | ID NO: |
| Neisseria | GLIKSLPNTP WQLRAAALDR KLTPLEWSAV LLHLIKHRGY LSQRKNEGET | 44) |
| meningitidis | ADKELGALLK GVADNAHALQ TGDFRTPAEL ALNKFEKESG HIRNQRGDYS | |
| Z2491 | HTFSRKDLQA ELILLFEKQK EFGNPHVSGG LKEGIETLLM TQRPALSGDA | |
| | VQKMLGHCTF EPAEPKAAKN TYTAERFIWL TKLNNLRILE QGSERPLTDT | |
| | ERATLMDEPY RKSKLTYAQA RKLLGLEDTA FFKGLRYGKD NAEASTLMEM | |
| | KAYHAISRAL EKEGLKDKKS PLNLSPELQD EIGTAFSLFK TDEDITGRLK | |
| | DRIQPEILEA LLKHISFDKF VQISLKALRR IVPLMEQGKR YDEACAEIYG | |
| | DHYGKKNTEE KIYLPPIPAD EIRNPVVLRA LSQARKVING VVRRYGSPAR | |
| | IHIETAREVG KSFKDRKEIE KRQEENRKDR EKAAAKFREY FPNFVGEPKS | |
| | KDILKLRLYE QQHGKCLYSG KEINLGRLNE KGYVEIDHAL PFSRTWDDSF | |
| | NNKVLVLGSE NQNKGNQTPY EYFNGKDNSR EWQEFKARVE TSRFPRSKKQ | |
| | RILLQKFDED GFKERNLNDT RYVNRFLCQF VADRMRLTGK GKKRVFASNG | |
| | QITNLLRGFW GLRKVRAEND RHHALDAVVV ACSTVAMQQK ITRFVRYKEM | |
| | NAFDGKTIDK ETGEVLHQKT HFPQPWEFFA QEVMIRVFGK PDGKPEFEEA | |
| | DTPEKLRTLL AEKLSSRPEA VHEYVTPLFV SRAPNRKMSG QGHMETVKSA | |
| | KRLDEGVSVL RVPLTQLKLK DLEKMVNRER EPKLYEALKA RLEAHKDDPA | |
| | KAFAEPFYKY DKAGNRTQQV KAVRVEQVQK TGVWVRNHNG IADNATMVRV | |
| | DVFEKGDKYY LVPIYSWQVA KGILPDRAVV QGKDEEDWQL IDDSFNFKFS | |
| | LHPNDLVEVI TKKARMFGYF ASCHRGTGNI NIRIHDLDHK IGKNGILEGI | |
| | GVKTALSFQK YQIDELGKEI RPCRLKKRPP VR | |
| WP_ | MQKNINTKQN HIYIKQAQKI KEKLGDKPYR IGLDLGVGSI GFAIVSMEEN | (SEQ |
| 012414420.1 | DGNVLLPKEI IMVGSRIFKA SAGAADRKLS RGQRNNHRHT RERMRYLWKV | ID NO: |
| Elusimicrobium | LAEQKLALPV PADLDRKENS SEGETSAKRF LGDVLQKDIY ELRVKSLDER | 45) |
| minutum | LSLQELGYVL YHIAGHRGSS AIRTFENDSE EAQKENTENK KIAGNIKRLM | |
| Pei191 | AKKNYRTYGE YLYKEFFENK EKHKREKISN AANNHKFSPT RDLVIKEAEA | |
| | ILKKQAGKDG FHKELTEEYI EKLTKAIGYE SEKLIPESGF CPYLKDEKRL | |
| | PASHKLNEER RLWETLNNAR YSDPIVDIVT GEITGYYEKQ FTKEQKQKLF | |
| | DYLLTGSELT PAQTKKLLGL KNTNFEDIIL QGRDKKAQKI KGYKLIKLES | |
| | MPFWARLSEA QQDSFLYDWN SCPDEKLLTE KLSNEYHLTE EEIDNAFNEI | |
| | VLSSSYAPLG KSAMLIILEK IKNDLSYTEA VEEALKEGKL TKEKQAIKDR | |
| | LPYYGAVLQE STQKIIAKGF SPQFKDKGYK TPHTNKYELE YGRIANPVVH | |
| | QTLNELRKLV NEIIDILGKK PCEIGLETAR ELKKSAEDRS KLSREQNDNE | |
| | SNRNRIYEIY IRPQQQVIIT RRENPRNYIL KFELLEEQKS QCPFCGGQIS | |
| | PNDIINNQAD IEHLFPIAES EDNGRNNLVI SHSACNADKA KRSPWAAFAS | |
| | AAKDSKYDYN RILSNVKENI PHKAWRFNQG AFEKFIENKP MAARFKTDNS | |
| | YISKVAHKYL ACLFEKPNII CVKGSLTAQL RMAWGLQGLM IPFAKQLITE | |
| | KESESFNKDV NSNKKIRLDN RHHALDAIVI AYASRGYGNL LNKMAGKDYK | |
| | INYSERNWLS KILLPPNNIV WENIDADLES FESSVKTALK NAFISVKHDH | |
| | SDNGELVKGT MYKIFYSERG YTLTTYKKLS ALKLTDPQKK KTPKDFLETA | |
| | LLKFKGRESE MKNEKIKSAI ENNKRLFDVI QDNLEKAKKL LEEENEKSKA | |
| | EGKKEKNIND ASIYQKAISL SGDKYVQLSK KEPGKFFAIS KPTPTTTGYG | |
| | YDTGDSLCVD LYYDNKGKLC GEIIRKIDAQ QKNPLKYKEQ GFTLFERIYG | |
| | GDILEVDFDI HSDKNSFRNN TGSAPENRVF IKVGTFTEIT NNNIQIWFGN | |
| | IIKSTGGQDD SFTINSMQQY NPRKLILSSC GFIKYRSPIL KNKEG | |
| WP_00910577 | MIMKLEKWRL GLDLGTNSIG WSVFSLDKDN SVQDLIDMGV RIFSDGRDPK | (SEQ |
| 7.1 | TKEPLAVARR TARSQRKLIY RRKLRRKQVF KFLQEQGLFP KTKEECMTLK | ID NO: |
| Treponema sp. | SLNPYELRIK ALDEKLEPYE LGRALFNLAV RRGFKSNRKD GSREEVSEKK | 46) |
| JC4 | SPDEIKTQAD MQTHLEKAIK ENGCRTITEF LYKNQGENGG IRFAPGRMTY | |
| | YPTRKMYEEE FNLIRSKQEK YYPQVDWDDI YKAIFYQRPL KPQQRGYCIY | |
| | ENDKERTFKA MPCSQKLRIL QDIGNLAYYE GGSKKRVELN DNQDKVLYEL | |
| | LNSKDKVTFD QMRKALCLAD SNSFNLEENR DFLIGNPTAV KMRSKNRFGK | |
| | LWDEIPLEEQ DLIIETIITA DEDDAVYEVI KKYDLTQEQR DFIVKNTILQ | |
| | SGTSMLCKEV SEKLVKRLEE IADLKYHEAV ESLGYKFADQ TVEKYDLLPY | |
| | YGKVLPGSTM EIDLSAPETN PEKHYGKISN PTVHVALNQT RVVVNALIKE | |
| | YGKPSQIAIE LSRDLKNNVE KKAEIARKQN QRAKENIAIN DTISALYHTA | |
| | FPGKSFYPNR NDRMKYRLWS ELGLGNKCIY CGKGISGAEL FTKEIEIEHI | |
| | LPFSRTLLDA ESNLTVAHSS CNAFKAERSP FEAFGTNPSG YSWQEIIQRA | |
| | NQLKNTSKKN KFSPNAMDSF EKDSSFIARQ LSDNQYIAKA ALRYLKCLVE | |
| | NPSDVWTTNG SMTKLLRDKW EMDSILCRKF TEKEVALLGL KPEQIGNYKK | |
| | NRFDHRHHAI DAVVIGLTDR SMVQKLATKN SHKGNRIEIP EFPILRSDLI | |
| | EKVKNIVVSF KPDHGAEGKL SKETLLGKIK LHGKETFVCR ENIVSLSEKN | |
| | LDDIVDEKIK SKVKDYVAKH KGQKIEAVLS DFSKENGIKK VRCVNRVQTP | |
| | IEITSGKISR YLSPEDYFAA VIWEIPGEKK TFKAQYIRRN EVEKNSKGLN | |
| | VVKPAVLENG KPHPAAKQVC LLHKDDYLEF SDKGKMYFCR IAGYAATNNK | |
| | LDIRPVYAVS YCADWINSTN ETMLTGYWKP TPTQNWVSVN VLFDKQKARL | |
| | VTVSPIGRVF RK | |
| WP_00246084 | MNQKFILGLD IGITSVGYGL IDYETKNIID AGVRLFPEAN VENNEGRRSK | (SEQ |
| 8.1 | RGSRRLKRRR IHRLERVKKL LEDYNLLDQS QIPQSTNPYA IRVKGLSEAL | ID NO: |
| Staphylococcus | SKDELVIALL HIAKRRGIHK IDVIDSNDDV GNELSTKEQL NKNSKLLKDK | 47) |
| lugdunensis | FVCQIQLERM NEGQVRGEKN RFKTADIIKE IIQLLNVQKN FHQLDENFIN | |
| M23590 | KYIELVEMRR EYFEGPGKGS PYGWEGDPKA WYETLMGHCT YFPDELRSVK | |
| | YAYSADLFNA LNDLNNLVIQ RDGLSKLEYH EKYHIIENVF KQKKKPTLKQ | |
| | IANEINVNPE DIKGYRITKS GKPQFTEFKL YHDLKSVLFD QSILENEDVL | |
| | DQIAEILTIY QDKDSIKSKL TELDILLNEE DKENIAQLTG YTGTHRLSLK | |
| | CIRLVLEEQW YSSRNQMEIF THLNIKPKKI NLTAANKIPK AMIDEFILSP | |
| | VVKRTFGQAI NLINKIIEKY GVPEDIIIEL ARENNSKDKQ KFINEMQKKN | |
| | ENTRKRINEI IGKYGNQNAK RLVEKIRLHD EQEGKCLYSL ESIPLEDLLN | |
| | NPNHYEVDHI IPRSVSFDNS YHNKVLVKQS ENSKKSNLTP YQYFNSGKSK | |
| | LSYNQFKQHI LNLSKSQDRI SKKKKEYLLE ERDINKFEVQ KEFINRNLVD | |
| | TRYATRELTN YLKAYFSANN MNVKVKTING SFTDYLRKVW KFKKERNHGY | |
| | KHHAEDALII ANADFLFKEN KKLKAVNSVL EKPEIESKQL DIQVDSEDNY | |
| | SEMFIIPKQV QDIKDFRNFK YSHRVDKKPN RQLINDTLYS TRKKDNSTYI | |
| | VQTIKDIYAK DNTTLKKQFD KSPEKFLMYQ HDPRTFEKLE VIMKQYANEK | |
| | NPLAKYHEET GEYLTKYSKK NNGPIVKSLK YIGNKLGSHL DVTHQFKSST | |
| | KKLVKLSIKP YRFDVYLTDK GYKFITISYL DVLKKDNYYY IPEQKYDKLK | |
| | LGKAIDKNAK FIASFYKNDL IKLDGEIYKI IGVNSDTRNM IELDLPDIRY | |
| | KEYCELNNIK GEPRIKKTIG KKVNSIEKLT TDVLGNVFTN TQYTKPQLLF | |
| | KRGN | |
| WP_ | MTKPYSIGLD IGTNSVGWAV TTDNYKVPSK KMKVLGNTSK KYIKKNLLGV | (SEQ |
| 011681470.1 | LLFDSGITAE GRRLKRTARR RYTRRRNRIL YLQEIFSTEM ATLDDAFFQR | ID NO: |
| Streptococcus | LDDSFLVPDD KRDSKYPIFG NLVEEKAYHD EFPTIYHLRK YLADSTKKAD | 48) |
| thermophilus | LRLVYLALAH MIKYRGHFLI EGEFNSKNND IQKNFQDFLD TYNAIFESDL | |
| LMD-9 | SLENSKQLEE IVKDKISKLE KKDRILKLFP GEKNSGIFSE FLKLIVGNQA | |
| | DFRKCFNLDE KASLHFSKES YDEDLETLLG YIGDDYSDVF LKAKKLYDAI | |
| | LLSGFLTVTD NETEAPLSSA MIKRYNEHKE DLALLKEYIR NISLKTYNEV | |
| | FKDDTKNGYA GYIDGKTNQE DFYVYLKKLL AEFEGADYFL EKIDREDFLR | |
| | KQRTFDNGSI PYQIHLQEMR AILDKQAKFY PFLAKNKERI EKILTFRIPY | |
| | YVGPLARGNS DFAWSIRKRN EKITPWNFED VIDKESSAEA FINRMTSFDL | |
| | YLPEEKVLPK HSLLYETFNV YNELTKVRFI AESMRDYQFL DSKQKKDIVR | |
| | LYFKDKRKVT DKDIIEYLHA IYGYDGIELK GIEKQFNSSL STYHDLLNII | |
| | NDKEFLDDSS NEAIIEEIIH TLTIFEDREM IKQRLSKFEN IFDKSVLKKL | |
| | SRRHYTGWGK LSAKLINGIR DEKSGNTILD YLIDDGISNR NFMQLIHDDA | |
| | LSFKKKIQKA QIIGDEDKGN IKEVVKSLPG SPAIKKGILQ SIKIVDELVK | |
| | VMGGRKPESI VVEMARENQY TNQGKSNSQQ RLKRLEKSLK ELGSKILKEN | |
| | IPAKLSKIDN NALQNDRLYL YYLQNGKDMY TGDDLDIDRL SNYDIDHIIP | |
| | QAFLKDNSID NKVLVSSASN RGKSDDVPSL EVVKKRKTFW YQLLKSKLIS | |
| | QRKFDNLTKA ERGGLSPEDK AGFIQRQLVE TRQITKHVAR LLDEKFNNKK | |
| | DENNRAVRTV KIITLKSTLV SQFRKDFELY KVREINDFHH AHDAYLNAVV | |
| | ASALLKKYPK LEPEFVYGDY PKYNSFRERK SATEKVYFYS NIMNIFKKSI | |
| | SLADGRVIER PLIEVNEETG ESVWNKESDL ATVRRVLSYP QVNVVKKVEE | |
| | QNHGLDRGKP KGLFNANLSS KPKPNSNENL VGAKEYLDPK KYGGYAGISN | |
| | SFTVLVKGTI EKGAKKKITN VLEFQGISIL DRINYRKDKL NFLLEKGYKD | |
| | IELIIELPKY SLFELSDGSR RMLASILSTN NKRGEIHKGN QIFLSQKFVK | |
| | LLYHAKRISN TINENHRKYV ENHKKEFEEL FYYILEFNEN YVGAKKNGKL | |
| | LNSAFQSWQN HSIDELCSSF IGPTGSERKG LFELTSRGSA ADFEFLGVKI | |
| | PRYRDYTPSS LLKDATLIHQ SVTGLYETRI DLAKLGEG | |
| WP_ | MKRILGLDLG TNSIGWALVN EAENKDERSS IVKLGVRVNP LTVDELTNFE | (SEQ |
| 009293010.1 | KGKSITTNAD RTLKRGMRRN LQRYKLRRET LTEVLKEHKL ITEDTILSEN | ID NO: |
| Bacteroides | GNRTTFETYR LRAKAVTEEI SLEEFARVLL MINKKRGYKS SRKAKGVEEG | 49) |
| fragilis NCTC | TLIDGMDIAR ELYNNNLTPG ELCLQLLDAG KKFLPDFYRS DLQNELDRIW | |
| 9343 Cas9 | EKQKEYYPEI LTDVLKEELR GKKRDAVWAI CAKYFVWKEN YTEWNKEKGK | |
| | TEQQEREHKL EGIYSKRKRD EAKRENLQWR VNGLKEKLSL EQLVIVFQEM | |
| | NTQINNSSGY LGAISDRSKE LYFNKQTVGQ YQMEMLDKNP NASLRNMVFY | |
| | RQDYLDEFNM LWEKQAVYHK ELTEELKKEI RDIIIFYQRR LKSQKGLIGF | |
| | CEFESRQIEV DIDGKKKIKT VGNRVISRSS PLFQEFKIWQ ILNNIEVTVV | |
| | GKKRKRRKLK ENYSALFEEL NDAEQLELNG SRRLCQEEKE LLAQELFIRD | |
| | KMTKSEVLKL LFDNPQELDL NFKTIDGNKT GYALFQAYSK MIEMSGHEPV | |
| | DFKKPVEKVV EYIKAVFDLL NWNTDILGFN SNEELDNQPY YKLWHLLYSF | |
| | EGDNTPTGNG RLIQKMTELY GFEKEYATIL ANVSFQDDYG SLSAKAIHKI | |
| | LPHLKEGNRY DVACVYAGYR HSESSLTREE IANKVLKDRL MLLPKNSLHN | |
| | PVVEKILNQM VNVINVIIDI YGKPDEIRVE LARELKKNAK EREELTKSIA | |
| | QTTKAHEEYK TLLQTEFGLT NVSRTDILRY KLYKELESCG YKTLYSNTYI | |
| | SREKLFSKEF DIEHIIPQAR LFDDSFSNKT LEARSVNIEK GNKTAYDFVK | |
| | EKFGESGADN SLEHYLNNIE DLFKSGKISK TKYNKLKMAE QDIPDGFIER | |
| | DLRNTQYIAK KALSMLNEIS HRVVATSGSV TDKLREDWQL IDVMKELNWE | |
| | KYKALGLVEY FEDRDGRQIG RIKDWTKRND HRHHAMDALT VAFTKDVFIQ | |
| | YFNNKNASLD PNANEHAIKN KYFQNGRAIA PMPLREFRAE AKKHLENTLI | |
| | SIKAKNKVIT GNINKTRKKG GVNKNMQQTP RGQLHLETIY GSGKQYLTKE | |
| | EKVNASFDMR KIGTVSKSAY RDALLKRLYE NDNDPKKAFA GKNSLDKQPI | |
| | WLDKEQMRKV PEKVKIVTLE AIYTIRKEIS PDLKVDKVID VGVRKILIDR | |
| | LNEYGNDAKK AFSNLDKNPI WLNKEKGISI KRVTISGISN AQSLHVKKDK | |
| | DGKPILDENG RNIPVDFVNT GNNHHVAVYY RPVIDKRGQL VVDEAGNPKY | |
| | ELEEVVVSFF EAVTRANLGL PIIDKDYKTT EGWQFLFSMK QNEYFVFPNE | |
| | KTGFNPKEID LLDVENYGLI SPNLFRVQKF SLKNYVFRHH LETTIKDTSS | |
| | ILRGITWIDF RSSKGLDTIV KVRVNHIGQI VSVGEY | |
| AOL40912.1 | METQTSNQLI TSHLKDYPKQ DYFVGLDIGT NSVGWAVTNT SYELLKFHSH | (SEQ |
| Veillonella | KMWGSRLFEE GESAVTRRGF RSMRRRLERR KLRLKLLEEL FADAMAQVDS | ID NO: |
| atypica ACS- | TFFIRLHESK YHYEDKTTGH SSKHILFIDE DYTDQDYFTE YPTIYHLRKD | 50) |
| 134-V-Col7a | LMENGTDDIR KLFLAVHHIL KYRGNFLYEG ATFNSNAFTF EDVLKQALVN | |
| | ITFNCFDTNS AISSISNILM ESGKTKSDKA KAIERLVDTY TVFDEVNTPD | |
| | KPQKEQVKED KKTLKAFANL VLGLSANLID LFGSVEDIDD DLKKLQIVGD | |
| | TYDEKRDELA KVWGDEIHII DDCKSVYDAI ILMSIKEPGL TISQSKVKAF | |
| | DKHKEDLVIL KSLLKLDRNV YNEMFKSDKK GLHNYVHYIK QGRTEETSCS | |
| | REDFYKYTKK IVEGLADSKD KEYILNEIEL QTLLPLQRIK DNGVIPYQLH | |
| | LEELKVILDK CGPKFPFLHT VSDGFSVTEK LIKMLEFRIP YYVGPLNTHH | |
| | NIDNGGFSWA VRKQAGRVTP WNFEEKIDRE KSAAAFIKNL TNKCTYLFGE | |
| | DVLPKSSLLY SEFMLLNELN NVRIDGKALA QGVKQHLIDS IFKQDHKKMT | |
| | KNRIELFLKD NNYITKKHKP EITGLDGEIK NDLTSYRDMV RILGNNFDVS | |
| | MAEDIITDIT IFGESKKMLR QTLRNKFGSQ LNDETIKKLS KLRYRDWGRL | |
| | SKKLLKGIDG CDKAGNGAPK TIIELMRNDS YNLMEILGDK FSFMECIEEE | |
| | NAKLAQGQVV NPHDIIDELA LSPAVKRAVW QALRIVDEVA HIKKALPSRI | |
| | FVEVARTNKS EKKKKDSRQK RLSDLYSAIK KDDVLQSGLQ DKEFGALKSG | |
| | LANYDDAALR SKKLYLYYTQ MGRCAYTGNI IDLNQLNTDN YDIDHIYPRS | |
| | LTKDDSFDNL VLCERTANAK KSDIYPIDNR IQTKQKPFWA FLKHQGLISE | |
| | RKYERLTRIA PLTADDLSGF IARQLVETNQ SVKATTTLLR RLYPDIDVVF | |
| | VKAENVSDFR HNNNFIKVRS LNHHHHAKDA YLNIVVGNVY HEKFTRNFRL | |
| | FFKKNGANRT YNLAKMFNYD VICTNAQDGK AWDVKTSMNT VKKMMASNDV | |
| | RVTRRLLEQS GALADATIYK ASVAAKAKDG AYIGMKTKYS VFADVTKYGG | |
| | MTKIKNAYSI IVQYTGKKGE EIKEIVPLPI YLINRNATDI ELIDYVKSVI | |
| | PKAKDISIKY RKLCINQLVK VNGFYYYLGG KTNDKIYIDN AIELVVPHDI | |
| | ATYIKLLDKY DLLRKENKTL KASSITTSIY NINTSTVVSL SNKVGIDVFD | |
| | YFMSKLRTPL YMKMKGNKVD ELSSTGRSKF IKMTLEEQSI YLLEVLNLLT | |
| | NSKTTFDVKP LGITGSRSTI GVKIHNLDEF KIINESITGL YSNEVTIV | |
| WP_ | MKYSIGLDIG IASVGWSVIN KDKERIEDMG VRIFQKAENP KDGSSLASSR | (SEQ |
| 013389026.1 | REKRGSRRRN RRKKHRLDRI KNILCESGLV KKNEIEKIYK NAYLKSPWEL | ID NO: |
| Ilyobacter | RAKSLEAKIS NKEIAQILLH IAKRRGFKSF RKTDRNADDT GKLLSGIQEN | 51) |
| polytropus | KKIMEEKGYL TIGDMVAKDP KFNTHVRNKA GSYLFSFSRK LLEDEVRKIQ | |
| DSM 2926 | AKQKELGNTH FTDDVLEKYI EVFNSQRNFD EGPSKPSPYY SEIGQIAKMI | |
| | GNCTFESSEK RTAKNTWSGE RFVFLQKLNN FRIVGLSGKR PLTEEERDIV | |
| | EKEVYLKKEV RYEKLRKILY LKEEERFGDL NYSKDEKQDK KTEKTKFISL | |
| | IGNYTIKKLN LSEKLKSEIE EDKSKLDKII EILTFNKSDK TIESNLKKLE | |
| | LSREDIEILL SEEFSGTLNL SLKAIKKILP YLEKGLSYNE ACEKADYDYK | |
| | NNGIKFKRGE LLPVVDKDLI ANPVVLRAIS QTRKVVNAII RKYGTPHTIH | |
| | VEVARDLAKS YDDRQTIIKE NKKRELENEK TKKFISEEFG IKNVKGKLLL | |
| | KYRLYQEQEG RCAYSRKELS LSEVILDESM TDIDHIIPYS RSMDDSYSNK | |
| | VLVLSGENRK KSNLLPKEYF DRQGRDWDTF VLNVKAMKIH PRKKSNLLKE | |
| | KFTREDNKDW KSRALNDTRY ISRFVANYLE NALEYRDDSP KKRVFMIPGQ | |
| | LTAQLRARWR LNKVRENGDL HHALDAAVVA VTDQKAINNI SNISRYKELK | |
| | NCKDVIPSIE YHADEETGEV YFEEVKDTRF PMPWSGFDLE LQKRLESENP | |
| | REEFYNLLSD KRYLGWFNYE EGFIEKLRPV FVSRMPNRGV KGQAHQETIR | |
| | SSKKISNQIA VSKKPLNSIK LKDLEKMQGR DTDRKLYEAL KNRLEEYDDK | |
| | PEKAFAEPFY KPTNSGKRGP LVRGIKVEEK QNVGVYVNGG QASNGSMVRI | |
| | DVFRKNGKFY TVPIYVHQTL LKELPNRAIN GKPYKDWDLI DGSFEFLYSF | |
| | YPNDLIEIEF GKSKSIKNDN KLTKTEIPEV NLSEVLGYYR GMDTSTGAAT | |
| | IDTQDGKIQM RIGIKTVKNI KKYQVDVLGN VYKVKREKRQ TF | |
| WP_00586426 | MKKIVGLDLG TNSIGWALIN AYINKEHLYG IEACGSRIIP MDAAILGNFD | (SEQ |
| 3.1 | KGNSISQTAD RTSYRGIRRL RERHLLRRER LHRILDLLGF LPKHYSDSLN | ID NO: |
| Parabacteroides | RYGKFLNDIE CKLPWVKDET GSYKFIFQES FKEMLANFTE HHPILIANNK | 52) |
| sp. 20_3 | KVPYDWTIYY LRKKALTQKI SKEELAWILL NFNQKRGYYQ LRGEEEETPN | |
| | KLVEYYSLKV EKVEDSGERK GKDTWYNVHL ENGMIYRRTS NIPLDWEGKT | |
| | KEFIVTTDLE ADGSPKKDKE GNIKRSFRAP KDDDWTLIKK KTEADIDKIK | |
| | MTVGAYIYDT LLQKPDQKIR GKLVRTIERK YYKNELYQIL KTQSEFHEEL | |
| | RDKQLYIACL NELYPNNEPR RNSISTRDFC HLFIEDIIFY QRPLKSKKSL | |
| | IDNCPYEENR YIDKESGEIK HASIKCIAKS HPLYQEFRLW QFIVNLRIYR | |
| | KETDVDVTQE LLPTEADYVT LFEWLNEKKE IDQKAFFKYP PFGFKKTTSN | |
| | YRWNYVEDKP YPCNETHAQI IARLGKAHIP KAFLSKEKEE TLWHILYSIE | |
| | DKQEIEKALH SFANKNNLSE EFIEQFKNFP PFKKEYGSYS AKAIKKLLPL | |
| | MRMGKYWSIE NIDNGTRIRI NKIIDGEYDE NIRERVRQKA INLTDITHFR | |
| | ALPLWLACYL VYDRHSEVKD IVKWKTPKDI DLYLKSFKQH SLRNPIVEQV | |
| | ITETLRTVRD IWQQVGHIDE IHIELGREMK NPADKRARMS QQMIKNENTN | |
| | LRIKALLTEF LNPEFGIENV RPYSPSQQDL LRIYEEGVLN SILELPEDIG | |
| | IILGKFNQTD TLKRPTRSEI LRYKLWLEQK YRSPYTGEMI PLSKLFTPAY | |
| | EIEHIIPQSR YFDDSLSNKV ICESEINKLK DRSLGYEFIK NHHGEKVELA | |
| | FDKPVEVLSV EAYEKLVHES YSHNRSKMKK LLMEDIPDQF IERQLNDSRY | |
| | ISKVVKSLLS NIVREENEQE AISKNVIPCT GGITDRLKKD WGINDVWNKI | |
| | VLPRFIRLNE LTESTRFTSI NTNNTMIPSM PLELQKGFNK KRIDHRHHAM | |
| | DAIIIACANR NIVNYLNNVS ASKNTKITRR DLQTLLCHKD KTDNNGNYKW | |
| | VIDKPWETFT QDTLTALQKI TVSFKQNLRV INKTTNHYQH YENGKKIVSN | |
| | QSKGDSWAIR KSMHKETVHG EVNLRMIKTV SFNEALKKPQ AIVEMDLKKK | |
| | ILAMLELGYD TKRIKNYFEE NKDTWQDINP SKIKVYYFTK ETKDRYFAVR | |
| | KPIDTSFDKK KIKESITDTG IQQIMLRHLE TKDNDPTLAF SPDGIDEMNR | |
| | NILILNKGKK HQPIYKVRVY EKAEKFTVGQ KGNKRTKFVE AAKGTNLFFA | |
| | IYETEEIDKD TKKVIRKRSY STIPLNVVIE RQKQGLSSAP EDENGNLPKY | |
| | ILSPNDLVYV PTQEEINKGE VVMPIDRDRI YKMVDSSGIT ANFIPASTAN | |
| | LIFALPKATA EIYCNGENCI QNEYGIGSPQ SKNQKAITGE MVKEICFPIK | |
| | VDRLGNIIQV GSCILTN | |
| GAP01010.1 | MVYDVGLDIG TGSVGWVALD ENGKLARAKG KNLVGVRLFD TAQTAADRRG | (SEQ |
| Fructobacillus | FRTTRRRLSR RKWRLRLLDE LFSAEINEID SSFFQRLKYS YVHPKDEENK | ID NO: |
| fructosus | AHYYGGYLFP TEEETKKFHR SYPTIYHLRQ ELMAQPNKRF DIREIYLAIH | 53) |
| KCTC 3544 | HLVKYRGHFL SSQEKITIGS TYNPEDLANA IEVYADEKGL SWELNNPEQL | |
| | TEIISGEAGY GLNKSMKADE ALKLFEFDNN QDKVAIKTLL AGLTGNQIDF | |
| | AKLFGKDISD KDEAKLWKLK LDDEALEEKS QTILSQLTDE EIELFHAVVQ | |
| | AYDGFVLIGL LNGADSVSAA MVQLYDQHRE DRKLLKSLAQ KAGLKHKRFS | |
| | EIYEQLALAT DEATIKNGIS TARELVEESN LSKEVKEDTL RRLDENEFLP | |
| | KQRTKANSVI PHQLHLAELQ KILQNQGQYY PFLLDTFEKE DGQDNKIEEL | |
| | LRFRIPYYVG PLVTKKDVEH AGGDADNHWV ERNEGFEKSR VTPWNFDKVF | |
| | NRDKAARDFI ERLTGNDTYL IGEKTLPQNS LRYQLFTVLN ELNNVRVNGK | |
| | KFDSKTKADL INDLFKARKT VSLSALKDYL KAQGKGDVTI TGLADESKFN | |
| | SSLSSYNDLK KTFDAEYLEN EDNQETLEKI IEIQTVFEDS KIASRELSKL | |
| | PLDDDQVKKL SQTHYTGWGR LSEKLLDSKI IDERGQKVSI LDKLKSTSQN | |
| | FMSIINNDKY GVQAWITEQN TGSSKLTFDE KVNELTTSPA NKRGIKQSFA | |
| | VLNDIKKAMK EEPRRVYLEF AREDQTSVRS VPRYNQLKEK YQSKSLSEEA | |
| | KVLKKTLDGN KNKMSDDRYF LYFQQQGKDM YTGRPINFER LSQDYDIDHI | |
| | IPQAFTKDDS LDNRVLVSRP ENARKSDSFA YTDEVQKQDG SLWTSLLKSG | |
| | FINRKKYERL TKAGKYLDGQ KTGFIARQLV ETRQIIKNVA SLIEGEYENS | |
| | KAVAIRSEIT ADMRLLVGIK KHREINSFHH AFDALLITAA GQYMQNRYPD | |
| | RDSTNVYNEF DRYTNDYLKN LRQLSSRDEV RRLKSFGFVV GTMRKGNEDW | |
| | SEENTSYLRK VMMFKNILTT KKTEKDRGPL NKETIFSPKS GKKLIPLNSK | |
| | RSDTALYGGY SNVYSAYMTL VRANGKNLLI KIPISIANQI EVGNLKINDY | |
| | IVNNPAIKKF EKILISKLPL GQLVNEDGNL IYLASNEYRH NAKQLWLSTT | |
| | DADKIASISE NSSDEELLEA YDILTSENVK NRFPFFKKDI DKLSQVRDEF | |
| | LDSDKRIAVI QTILRGLQID AAYQAPVKII SKKVSDWHKL QQSGGIKLSD | |
| | NSEMIYQSAT GIFETRVKIS DLL | |
| Bacillus smithii | MNYKMGLDIG IASVGWAVIN LDLKRIEDLG VRIFDKAEHP QNGESLALPR | (SEQ |
| WP_00335419 | RIARSARRRL RRRKHRLERI RRLLVSENVL TKEEMNLLFK QKKQIDVWQL | ID NO: |
| 6.1 | RVDALERKLN NDELARVLLH LAKRRGFKSN RKSERNSKES SEFLKNIEEN | 54) |
| | QSILAQYRSV GEMIVKDSKF AYHKRNKLDS YSNMIARDDL EREIKLIFEK | |
| | QREFNNPVCT ERLEEKYLNI WSSQRPFASK EDIEKKVGFC TFEPKEKRAP | |
| | KATYTFQSFI VWEHINKLRL VSPDETRALT EIERNLLYKQ AFSKNKMTYY | |
| | DIRKLLNLSD DIHFKGLLYD PKSSLKQIEN IRFLELDSYH KIRKCIENVY | |
| | GKDGIRMFNE TDIDTFGYAL TIFKDDEDIV AYLQNEYITK NGKRVSNLAN | |
| | KVYDKSLIDE LLNLSFSKFA HLSMKAIRNI LPYMEQGEIY SKACELAGYN | |
| | FTGPKKKEKA LLLPVIPNIA NPVVMRALTQ SRKVVNAIIK KYGSPVSIHI | |
| | ELARDLSHSF DERKKIQKDQ TENRKKNETA IKQLIEYELT KNPTGLDIVK | |
| | FKLWSEQQGR CMYSLKPIEL ERLLEPGYVE VDHILPYSRS LDDSYANKVL | |
| | VLTKENREKG NHTPVEYLGL GSERWKKFEK FVLANKQFSK KKKQNLLRLR | |
| | YEETEEKEFK ERNLNDTRYI SKFFANFIKE HLKFADGDGG QKVYTINGKI | |
| | TAHLRSRWDF NKNREESDLH HAVDAVIVAC ATQGMIKKIT EFYKAREQNK | |
| | ESAKKKEPIF PQPWPHFADE LKARLSKFPQ ESIEAFALGN YDRKKLESLR | |
| | PVFVSRMPKR SVTGAAHQET LRRCVGIDEQ SGKIQTAVKT KLSDIKLDKD | |
| | GHFPMYQKES DPRTYEAIRQ RLLEHNNDPK KAFQEPLYKP KKNGEPGPVI | |
| | RTVKIIDTKN KVVHLDGSKT VAYNSNIVRT DVFEKDGKYY CVPVYTMDIM | |
| | KGTLPNKAIE ANKPYSEWKE MTEEYTFQFS LFPNDLVRIV LPREKTIKTS | |
| | TNEEIIIKDI FAYYKTIDSA TGGLELISHD RNFSLRGVGS KTLKRFEKYQ | |
| | VDVLGNIHKV KGEKRVGLAA PTNQKKGKTV DSLQSVSD | |
| Mycoplasma | MEKKRKVTLG FDLGIASVGW AIVDSETNQV YKLGSRLFDA PDTNLERRTQ | (SEQ |
| canis PG 14 | RGTRRLLRRR KYRNQKFYNL VKRTEVFGLS SREAIENRFR ELSIKYPNII | ID NO: |
| EIE39736.1 | ELKTKALSQE VCPDEIAWIL HDYLKNRGYF YDEKETKEDF DQQTVESMPS | 55) |
| WP_004794730.1 | YKLNEFYKKY GYFKGALSQP TESEMKDNKD LKEAFFFDFS NKEWLKEINY | |
| | FFNVQKNILS ETFIEEFKKI FSFTRDISKG PGSDNMPSPY GIFGEFGDNG | |
| | QGGRYEHIWD KNIGKCSIFT NEQRAPKYLP SALIFNFLNE LANIRLYSTD | |
| | KKNIQPLWKL SSVDKLNILL NLFNLPISEK KKKLTSTNIN DIVKKESIKS | |
| | IMISVEDIDM IKDEWAGKEP NVYGVGLSGL NIEESAKENK FKFQDLKILN | |
| | VLINLLDNVG IKFEFKDRND IIKNLELLDN LYLFLIYQKE SNNKDSSIDL | |
| | FIAKNESLNI ENLKLKLKEF LLGAGNEFEN HNSKTHSLSK KAIDEILPKL | |
| | LDNNEGWNLE AIKNYDEEIK SQIEDNSSLM AKQDKKYLND NFLKDAILPP | |
| | NVKVTFQQAI LIFNKIIQKF SKDFEIDKVV IELAREMTQD QENDALKGIA | |
| | KAQKSKKSLV EERLEANNID KSVFNDKYEK LIYKIFLWIS QDFKDPYTGA | |
| | QISVNEIVNN KVEIDHIIPY SLCFDDSSAN KVLVHKQSNQ EKSNSLPYEY | |
| | IKQGHSGWNW DEFTKYVKRV FVNNVDSILS KKERLKKSEN LLTASYDGYD | |
| | KLGFLARNLN DTRYATILFR DQLNNYAEHH LIDNKKMFKV IAMNGAVTSF | |
| | IRKNMSYDNK LRLKDRSDFS HHAYDAAIIA LFSNKTKTLY NLIDPSLNGI | |
| | ISKRSEGYWV IEDRYTGEIK ELKKEDWTSI KNNVQARKIA KEIEEYLIDL | |
| | DDEVFFSRKT KRKTNRQLYN ETIYGIATKT DEDGITNYYK KEKFSILDDK | |
| | DIYLRLLRER EKFVINQSNP EVIDQIIEII ESYGKENNIP SRDEAINIKY | |
| | TKNKINYNLY LKQYMRSLTK SLDQFSEEFI NQMIANKTFV LYNPTKNTTR | |
| | KIKFLRLVND VKINDIRKNQ VINKFNGKNN EPKAFYENIN SLGAIVFKNS | |
| | ANNFKTLSIN TQIAIFGDKN WDIEDFKTYN MEKIEKYKEI YGIDKTYNFH | |
| | SFIFPGTILL DKQNKEFYYI SSIQTVRDII EIKFLNKIEF KDENKNQDTS | |
| | KTPKRLMFGI KSIMNNYEQV DISPFGINKK IFE | |
| Odoribacter | METTLGIDLG TNSIGLALVD QEEHQILYSG VRIFPEGINK DTIGLGEKEE | (SEQ |
| laneus YIT | SRNATRRAKR QMRRQYFRKK LRKAKLLELL IAYDMCPLKP EDVRRWKNWD | ID NO: |
| EHP49880.1 | KQQKSTVRQF PDTPAFREWL KQNPYELRKQ AVTEDVTRPE LGRILYQMIQ | 56) |
| | RRGFLSSRKG KEEGKIFTGK DRMVGIDETR KNLQKQTLGA YLYDIAPKNG | |
| | EKYRFRTERV RARYTLRDMY IREFEIIWQR QAGHLGLAHE QATRKKNIFL | |
| | EGSATNVRNS KLITHLQAKY GRGHVLIEDT RITVTFQLPL KEVLGGKIEI | |
| | EEEQLKFKSN ESVLFWQRPL RSQKSLLSKC VFEGRNFYDP VHQKWIIAGP | |
| | TPAPLSHPEF EEFRAYQFIN NIIYGKNEHL TAIQREAVFE LMCTESKDFN | |
| | FEKIPKHLKL FEKFNFDDTT KVPACTTISQ LRKLFPHPVW EEKREEIWHC | |
| | FYFYDDNTLL FEKLQKDYAL QTNDLEKIKK IRLSESYGNV SLKAIRRINP | |
| | YLKKGYAYST AVLLGGIRNS FGKRFEYFKE YEPEIEKAVC RILKEKNAEG | |
| | EVIRKIKDYL VHNRFGFAKN DRAFQKLYHH SQAITTQAQK ERLPETGNLR | |
| | NPIVQQGLNE LRRTVNKLLA TCREKYGPSF KFDHIHVEMG RELRSSKTER | |
| | EKQSRQIREN EKKNEAAKVK LAEYGLKAYR DNIQKYLLYK EIEEKGGTVC | |
| | CPYTGKTLNI SHTLGSDNSV QIEHIIPYSI SLDDSLANKT LCDATFNREK | |
| | GELTPYDFYQ KDPSPEKWGA SSWEEIEDRA FRLLPYAKAQ RFIRRKPQES | |
| | NEFISRQLND TRYISKKAVE YLSAICSDVK AFPGQLTAEL RHLWGLNNIL | |
| | QSAPDITFPL PVSATENHRE YYVITNEQNE VIRLFPKQGE TPRTEKGELL | |
| | LTGEVERKVF RCKGMQEFQT DVSDGKYWRR IKLSSSVTWS PLFAPKPISA | |
| | DGQIVLKGRI EKGVFVCNQL KQKLKTGLPD GSYWISLPVI SQTFKEGESV | |
| | NNSKLTSQQV QLFGRVREGI FRCHNYQCPA SGADGNFWCT LDTDTAQPAF | |
| | TPIKNAPPGV GGGQIILTGD VDDKGIFHAD DDLHYELPAS LPKGKYYGIF | |
| | TVESCDPTLI PIELSAPKTS KGENLIEGNI WVDEHTGEVR FDPKKNREDQ | |
| | RHHAIDAIVI ALSSQSLFQR LSTYNARREN KKRGLDSTEH FPSPWPGFAQ | |
| | DVRQSVVPLL VSYKQNPKTL CKISKTLYKD GKKIHSCGNA VRGQLHKETV | |
| | YGQRTAPGAT EKSYHIRKDI RELKTSKHIG KVVDITIRQM LLKHLQENYH | |
| | IDITQEFNIP SNAFFKEGVY RIFLPNKHGE PVPIKKIRMK EELGNAERLK | |
| | DNINQYVNPR NNHHVMIYQD ADGNLKEEIV SFWSVIERQN QGQPIYQLPR | |
| | EGRNIVSILQ INDTFLIGLK EEEPEVYRND LSTLSKHLYR VQKLSGMYYT | |
| | FRHHLASTLN NEREEFRIQS LEAWKRANPV KVQIDEIGRI TFLNGPLC | |
| Akkermansia | MSRSLTFSFD IGYASIGWAV IASASHDDAD PSVCGCGTVL FPKDDCQAFK | (SEQ |
| muciniphila | RREYRRLRRN IRSRRVRIER IGRLLVQAQI ITPEMKETSG HPAPFYLASE | ID NO: |
| ATCC BAA- | ALKGHRTLAP IELWHVLRWY AHNRGYDNNA SWSNSLSEDG GNGEDTERVK | 57) |
| 835 | HAQDLMDKHG TATMAETICR ELKLEEGKAD APMEVSTPAY KNLNTAFPRL | |
| WP_01242103 | IVEKEVRRIL ELSAPLIPGL TAEIIELIAQ HHPLTTEQRG VLLQHGIKLA | |
| 4.1 | RRYRGSLLFG QLIPRFDNRI ISRCPVTWAQ VYEAELKKGN SEQSARERAE | |
| | KLSKVPTANC PEFYEYRMAR ILCNIRADGE PLSAEIRREL MNQARQEGKL | |
| | TKASLEKAIS SRLGKETETN VSNYFTLHPD SEEALYLNPA VEVLQRSGIG | |
| | QILSPSVYRI AANRLRRGKS VTPNYLLNLL KSRGESGEAL EKKIEKESKK | |
| | KEADYADTPL KPKYATGRAP YARTVLKKWV EEILDGEDPT RPARGEAHPD | |
| | GELKAHDGCL YCLLDTDSSV NQHQKERRLD TMTNNHLVRH RMLILDRLLK | |
| | DLIQDFADGQ KDRISRVCVE VGKELTTFSA MDSKKIQREL TLRQKSHTDA | |
| | VNRLKRKLPG KALSANLIRK CRIAMDMNWT CPFTGATYGD HELENLELEH | |
| | IVPHSFRQSN ALSSLVLTWP GVNRMKGQRT GYDFVEQEQE NPVPDKPNLH | |
| | ICSLNNYREL VEKLDDKKGH EDDRRRKKKR KALLMVRGLS HKHQSQNHEA | |
| | MKEIGMTEGM MTQSSHLMKL ACKSIKTSLP DAHIDMIPGA VTAEVRKAWD | |
| | VFGVFKELCP EAADPDSGKI LKENLRSLTH LHHALDACVL GLIPYIIPAH | |
| | HNGLLRRVLA MRRIPEKLIP QVRPVANQRH YVLNDDGRMM LRDLSASLKE | |
| | NIREQLMEQR VIQHVPADMG GALLKETMQR VLSVDGSGED AMVSLSKKKD | |
| | GKKEKNQVKA SKLVGVFPEG PSKLKALKAA IEIDGNYGVA LDPKPVVIRH | |
| | IKVFKRIMAL KEQNGGKPVR ILKKGMLIHL TSSKDPKHAG VWRIESIQDS | |
| | KGGVKLDLQR AHCAVPKNKT HECNWREVDL ISLLKKYQMK RYPTSYTGTP | |
| | R | |
| Dinoroseobacter | MRLGLDIGTS SIGWWLYETD GAGSDARITG WDGGVRIFS DGRDPKSGAS | (SEQ |
| shibae DFL | LAVDRRAARA MRRRRDRYLR RRATLMKVLA ETGLMPADPA EAKALEALDP | ID NO: |
| 12 = DSM | FALRAAGLDE PLPLPHLGRA LFHLNQRRGF KSNRKTDRGD NESGKIKDAT | 58) |
| 16493 | ARLDMEMMAN GARTYGEFLH KRRQKATDPR HVPSVRTRLS IANRGGPDGK | |
| WP_01217707 | EEAGYDFYPD RRHLEEEFHK LWAAQGAHHP ELTETLRDLL FEKIFFQRPL | |
| 9.1 | KEPEVGLCLF SGHHGVPPKD PRLPKAHPLT QRRVLYETVN QLRVTADGRE | |
| | ARPLTREERD QVIHALDNKK PTKSLSSMVL KLPALAKVLK LRDGERFTLE | |
| | TGVRDAIACD PLRASPAHPD RFGPRWSILD ADAQWEVISR IRRVQSDAEH | |
| | AALVDWLTEA HGLDRAHAEA TAHAPLPDGY GRLGLTATTR ILYQLTADWV | |
| | TYADAVKACG WHHSDGRTGE CFDRLPYYGE VLERHVIPGS YHPDDDDITR | |
| | FGRITNPTVH IGLNQLRRLV NRIIETHGKP HQIVVELARD LKKSEEQKRA | |
| | DIKRIRDTTE AAKKRSEKLE ELEIEDNGRN RMLLRLWEDL NPDDAMRRFC | |
| | PYTGTRISAA MIFDGSCDVD HILPYSRTLD DSFPNRTLCL REANRQKRNQ | |
| | TPWQAWGDTP HWHAIAANLK NLPENKRWRF APDAMTRFEG ENGFLDRALK | |
| | DTQYLARISR SYLDTLFTKG GHVWVVPGRF TEMLRRHWGL NSLLSDAGRG | |
| | AVKAKNRTDH RHHAIDAAVI AATDPGLLNR ISRAAGQGEA AGQSAELIAR | |
| | DTPPPWEGFR DDLRVRLDRI IVSHRADHGR IDHAARKQGR DSTAGQLHQE | |
| | TAYSIVDDIH VASRTDLLSL KPAQLLDEPG RSGQVRDPQL RKALRVATGG | |
| | KTGKDFENAL RYFASKPGPY QAIRRVRIIK PLQAQARVPV PAQDPIKAYQ | |
| | GGSNHLFEIW RLPDGEIEAQ VITSFEAHTL EGEKRPHPAA KRLLRVHKGD | |
| | MVALERDGRR VVGHVQKMDI ANGLFIVPHN EANADTRNND KSDPFKWIQI | |
| | GARPAIASGI RRVSVDEIGR LRDGGTRPI | |
| Wolinella | MIERILGVDL GISSLGWAIV EYDKDDEAAN RIIDCGVRLF TAAETPKKKE | (SEQ |
| succinogenes | SPNKARREAR GIRRVLNRRR VRMNMIKKLF LRAGLIQDVD LDGEGGMFYS | ID NO: |
| DSM 1740 | KANRADVWEL RHDGLYRLLK GDELARVLIH IAKHRGYKFI GDDEADEESG | 59) |
| WP_01113928 | KVKKAGVVLR QNFEAAGCRT VGEWLWRERG ANGKKRNKHG DYEISIHRDL | |
| 9.1 | LVEEVEAIFV AQQEMRSTIA TDALKAAYRE IAFFVRPMQR IEKMVGHCTY | |
| | FPEERRAPKS APTAEKFIAI SKFFSTVIID NEGWEQKIIE RKTLEELLDF | |
| | AVSREKVEFR HLRKFLDLSD NEIFKGLHYK GKPKTAKKRE ATLFDPNEPT | |
| | ELEFDKVEAE KKAWISLRGA AKLREALGNE FYGRFVALGK HADEATKILT | |
| | YYKDEGQKRR ELTKLPLEAE MVERLVKIGF SDFLKLSLKA IRDILPAMES | |
| | GARYDEAVLM LGVPHKEKSA ILPPLNKTDI DILNPTVIRA FAQFRKVANA | |
| | LVRKYGAFDR VHFELAREIN TKGEIEDIKE SQRKNEKERK EAADWIAETS | |
| | FQVPLTRKNI LKKRLYIQQD GRCAYTGDVI ELERLFDEGY CEIDHILPRS | |
| | RSADDSFANK VLCLARANQQ KTDRTPYEWF GHDAARWNAF ETRTSAPSNR | |
| | VRTGKGKIDR LLKKNFDENS EMAFKDRNLN DTRYMARAIK TYCEQYWVFK | |
| | NSHTKAPVQV RSGKLTSVLR YQWGLESKDR ESHTHHAVDA IIIAFSTQGM | |
| | VQKLSEYYRF KETHREKERP KLAVPLANFR DAVEEATRIE NTETVKEGVE | |
| | VKRLLISRPP RARVTGQAHE QTAKPYPRIK QVKNKKKWRL APIDEEKFES | |
| | FKADRVASAN QKNFYETSTI PRVDVYHKKG KFHLVPIYLH EMVLNELPNL | |
| | SLGTNPEAMD ENFFKFSIFK DDLISIQTQG TPKKPAKIIM GYFKNMHGAN | |
| | MVLSSINNSP CEGFTCTPVS MDKKHKDKCK LCPEENRIAG RCLQGFLDYW | |
| | SQEGLRPPRK EFECDQGVKF ALDVKKYQID PLGYYYEVKQ EKRLGTIPQM | |
| | RSAKKLVKK | |
| Parasutterella | MGKTHIIGVG LDLGGTYTGT FITSHPSDEA EHRDHSSAFT VVNSEKLSFS | (SEQ |
| excrementihominis | SKSRTAVRHR VRSYKGFDLR RRLLLLVAEY QLLQKKQTLA PEERENLRIA | ID NO: |
| YIT | LSGYLKRRGY ARTEAETDTS VLESLDPSVF SSAPSFTNFF NDSEPLNIQW | 60) |
| 11859 | EAIANSPETT KALNKELSGQ KEADFKKYIK TSFPEYSAKE ILANYVEGRR | |
| WP_00886484 | AILDASKYIA NLQSLGHKHR SKYLSDILQD MKRDSRITRL SEAFGSTDNL | |
| 3.1 | WRIIGNISNL QERAVRWYFN DAKFEQGQEQ LDAVKLKNVL VRALKYLRSD | |
| | DKEWSASQKQ IIQSLEQSGD VLDVLAGLDP DRTIPPYEDQ NNRRPPEDQT | |
| | LYLNPKALSS EYGEKWKSWA NKFAGAYPLL TEDLTEILKN TDRKSRIKIR | |
| | SDVLPDSDYR LAYILQRAFD RSIALDECSI RRTAEDFENG VVIKNEKLED | |
| | VLSGHQLEEF LEFANRYYQE TAKAKNGLWF PENALLERAD LHPPMKNKIL | |
| | NVIVGQALGV SPAEGTDFIE EIWNSKVKGR STVRSICNAI ENERKTYGPY | |
| | FSEDYKFVKT ALKEGKTEKE LSKKFAAVIK VLKMVSEVVP FIGKELRLSD | |
| | EAQSKFDNLY SLAQLYNLIE TERNGFSKVS LAAHLENAWR MTMTDGSAQC | |
| | CRLPADCVRP FDGFIRKAID RNSWEVAKRI AEEVKKSVDF TNGTVKIPVA | |
| | IEANSFNFTA SLTDLKYIQL KEQKLKKKLE DIQRNEENQE KRWLSKEERI | |
| | RADSHGICAY TGRPLDDVGE IDHIIPRSLT LKKSESIYNS EVNLIFVSAQ | |
| | GNQEKKNNIY LLSNLAKNYL AAVFGTSDLS QITNEIESTV LQLKAAGRLG | |
| | YFDLLSEKER ACARHALFLN SDSEARRAVI DVLGSRRKAS VNGTQAWFVR | |
| | SIFSKVRQAL AAWTQETGNE LIFDAISVPA ADSSEMRKRF AEYRPEFRKP | |
| | KVQPVASHSI DAMCIYLAAC SDPFKTKRMG SQLAIYEPIN FDNLFTGSCQ | |
| | VIQNTPRNFS DKTNIANSPI FKETIYAERF LDIIVSRGEI FIGYPSNMPF | |
| | EEKPNRISIG GKDPFSILSV LGAYLDKAPS SEKEKLTIYR VVKNKAFELF | |
| | SKVAGSKFTA EEDKAAKILE ALHFVTVKQD VAATVSDLIK SKKELSKDSI | |
| | ENLAKQKGCL KKVEYSSKEF KFKGSLIIPA AVEWGKVLWN VFKENTAEEL | |
| | KDENALRKAL EAAWPSSFGT RNLHSKAKRV FSLPVVATQS GAVRIRRKTA | |
| | FGDFVYQSQD TNNLYSSFPV KNGKLDWSSP IIHPALQNRN LTAYGYRFVD | |
| | HDRSISMSEF REVYNKDDLM RIELAQGTSS RRYLRVEMPG EKFLAWFGEN | |
| | SISLGSSFKF SVSEVFDNKI YTENAEFTKF LPKPREDNKH NGTIFFELVG | |
| | PRVIFNYIVG GAASSLKEIF SEAGKERS | |
| Streptococcus | MTKFNKNYSI GLDIGVSSVG YAVVTEDYRV PAFKFKVLGN TEKEKIKKNL | (SEQ |
| sanguinis | IGSTTFVSAQ PAKGTRVFRV NRRRIDRRNH RITYLRDIFQ KEIEKVDKNF | ID NO: |
| SK49 | YRRLDESFRV LGDKSEDLQI KQPFFGDKEL ETAYHKKYPT IYHLRKHLAD | 61) |
| WP_00293358 | ADKNSPVADI REVYMAISHI LKYRGHFLTL DKINPNNINM QNSWIDFIES | |
| 9.1 | CQEVFDLEIS DESKNIADIF KSSENRQEKV KKILPYFQQE LLKKDKSIFK | |
| | QLLQLLFGLK TKFKDCFELE EEPDLNFSKE NYDENLENFL GSLEEDFSDV | |
| | FAKLKVLRDT ILLSGMLTYT GATHARFSAT MVERYEEHRK DLQRFKFFIK | |
| | QNLSEQDYLD IFGRKTQNGF DVDKETKGYV GYITNKMVLT NPQKQKTIQQ | |
| | NFYDYISGKI TGIEGAEYFL NKISDGTFLR KLRTSDNGAI PNQIHAYELE | |
| | KIIERQGKDY PFLLENKDKL LSILTFKIPY YVGPLAKGSN SRFAWIKRAT | |
| | SSDILDDNDE DTRNGKIRPW NYQKLINMDE TRDAFITNLI GNDIILLNEK | |
| | VLPKRSLIYE EVMLQNELTR VKYKDKYGKA HFFDSELRQN IINGLFKNNS | |
| | KRVNAKSLIK YLSDNHKDLN AIEIVSGVEK GKSFNSTLKT YNDLKTIFSE | |
| | ELLDSEIYQK ELEEIIKVIT VFDDKKSIKN YLTKFFGHLE ILDEEKINQL | |
| | SKLRYSGWGR YSAKLLLDIR DEDTGFNLLQ FLRNDEENRN LTKLISDNTL | |
| | SFEPKIKDIQ SKSTIEDDIF DEIKKLAGSP AIKRGILNSI KIVDELVQII | |
| | GYPPHNIVIE MARENMTTEE GQKKAKTRKT KLESALKNIE NSLLENGKVP | |
| | HSDEQLQSEK LYLYYLQNGK DMYTLDKTGS PAPLYLDQLD QYEVDHIIPY | |
| | SFLPIDSIDN KVLTHRENNQ QKLNNIPDKE TVANMKPFWE KLYNAKLISQ | |
| | TKYQRLTTSE RTPDGVLTES MKAGFIERQL VETRQIIKHV ARILDNRFSD | |
| | TKIITLKSQL ITNFRNTFHI AKIRELNDYH HAHDAYLAVV VGQTLLKVYP | |
| | KLAPELIYGH HAHFNRHEEN KATLRKHLYS NIMRFFNNPD SKVSKDIWDC | |
| | NRDLPIIKDV IYNSQINFVK RTMIKKGAFY NQNPVGKFNK QLAANNRYPL | |
| | KTKALCLDTS IYGGYGPMNS ALSIIIIAER FNEKKGKIET VKEFHDIFII | |
| | DYEKFNNNPF QFLNDTSENG FLKKNNINRV LGFYRIPKYS LMQKIDGTRM | |
| | LFESKSNLHK ATQFKLTKTQ NELFFHMKRL LTKSNLMDLK SKSAIKESQN | |
| | FILKHKEEFD NISNQLSAFS QKMLGNTTSL KNLIKGYNER KIKEIDIRDE | |
| | TIKYFYDNFI KMFSFVKSGA PKDINDFFDN KCTVARMRPK PDKKLLNATL | |
| | IHQSITGLYE TRIDLSKLGE D | |
| Actinomyces | MLHCIAVIRV PPSEEPGFFE THADSCALCH HGCMTYAAND KAIRYRVGID | (SEQ |
| sp. oral taxon | VGLRSIGFCA VEVDDEDHPI RILNSVVHVH DAGTGGPGET ESLRKRSGVA | ID NO: |
| 180 str. F0310 | ARARRRGRAE KQRLKKLDVL LEELGWGVSS NELLDSHAPW HIRKRLVSEY | 62) |
| AOL41039.1 | IEDETERRQC LSVAMAHIAR HRGWRNSFSK VDTLLLEQAP SDRMQGLKER | |
| | VEDRTGLQFS EEVTQGELVA TLLEHDGDVT IRGFVRKGGK ATKVHGVLEG | |
| | KYMQSDLVAE LRQICRTQRV SETTFEKLVL SIFHSKEPAP SAARQRERVG | |
| | LDELQLALDP AAKQPRAERA HPAFQKFKVV ATLANMRIRE QSAGERSLTS | |
| | EELNRVARYL LNHTESESPT WDDVARKLEV PRHRLRGSSR ASLETGGGLT | |
| | YPPVDDTTVR VMSAEVDWLA DWWDCANDES RGHMIDAISN GCGSEPDDVE | |
| | DEEVNELISS ATAEDMLKLE LLAKKLPSGR VAYSLKTLRE VTAAILETGD | |
| | DLSQAITRLY GVDPGWVPTP APIEAPVGNP SVDRVLKQVA RWLKFASKRW | |
| | GVPQTVNIEH TREGLKSASL LEEERERWER FEARREIRQK EMYKRLGISG | |
| | PFRRSDQVRY EILDLQDCAC LYCGNEINFQ TFEVDHIIPR VDASSDSRRT | |
| | NLAAVCHSCN SAKGGLAFGQ WVKRGDCPSG VSLENAIKRV RSWSKDRLGL | |
| | TEKAMGKRKS EVISRLKTEM PYEEFDGRSM ESVAWMAIEL KKRIEGYFNS | |
| | DRPEGCAAVQ VNAYSGRLTA CARRAAHVDK RVRLIRLKGD DGHHKNRFDR | |
| | RNHAMDALVI ALMTPAIART IAVREDRREA QQLTRAFESW KNFLGSEERM | |
| | QDRWESWIGD VEYACDRLNE LIDADKIPVT ENLRLRNSGK LHADQPESLK | |
| | KARRGSKRPR PQRYVLGDAL PADVINRVTD PGLWTALVRA PGFDSQLGLP | |
| | ADLNRGLKLR GKRISADFPI DYFPTDSPAL AVQGGYVGLE FHHARLYRII | |
| | GPKEKVKYAL LRVCAIDLCG IDCDDLFEVE LKPSSISMRT ADAKLKEAMG | |
| | NGSAKQIGWL VLGDEIQIDP TKFPKQSIGK FLKECGPVSS WRVSALDTPS | |
| | KITLKPRLLS NEPLLKTSRV GGHESDLVVA ECVEKIMKKT GWVVEINALC | |
| | QSGLIRVIRR NALGEVRTSP KSGLPISLNL R | |
| Rhodovulum | MGIRFAFDLG TNSIGWAVWR TGPGVFGEDT AASLDGSGVL IFKDGRNPKD | (SEQ |
| sp. PH10 | GQSLATMRRV PRQSRKRRDR FVLRRRDLLA ALRKAGLFPV DVEEGRRLAA | ID NO: |
| WP_00838698 | TDPYHLRAKA LDESLTPHEM GRVIFHLNQR RGFRSNRKAD RQDREKGKIA | 63) |
| 3.1 | EGSKRLAETL AATNCRTLGE FLWSRHRGTP RTRSPTRIRM EGEGAKALYA | |
| | FYPTREMVRA EFERLWTAQS RFAPDLLTPE RHEEIAGILF RQRDLAPPKI | |
| | GCCTFEPSER RLPRALPSVE ARGIYERLAH LRITTGPVSD RGLTRPERDV | |
| | LASALLAGKS LTFKAVRKTL KILPHALVNF EEAGEKGLDG ALTAKLLSKP | |
| | DHYGAAWHGL SFAEKDTFVG KLLDEADEER LIRRLVTENR LSEDAARRCA | |
| | SIPLADGYGR LGRTANTEIL AALVEETDET GTVVTYAEAV RRAGERTGRN | |
| | WHHSDERDGV ILDRLPYYGE ILQRHVVPGS GEPEEKNEAA RWGRLANPTV | |
| | HIGLNQLRKV VNRLIAAHGR PDQIVVELAR ELKLNREQKE RLDRENRKNR | |
| | EENERRTAIL AEHGQRDTAE NKIRLRLFEE QARANAGIAL CPYTGRAIGI | |
| | AELFTSEVEI DHILPVSLTL DDSLANRVLC RREANREKRR QTPFQAFGAT | |
| | PAWNDIVARA AKLPPNKRWR FDPAALERFE REGGFLGRQL NETKYLSRLA | |
| | KIYLGKICDP DRVYVTPGTL TGLLRARWGL NSILSDSNFK NRSDHRHHAV | |
| | DAVVIGVLTR GMIQRIAHDA ARAEDQDLDR VFRDVPVPFE DFRDHVRERV | |
| | STITVAVKPE HGKGGALHED TSYGLVPDTD PNAALGNLVV RKPIRSLTAG | |
| | EVDRVRDRAL RARLGALAAP FRDESGRVRD AKGLAQALEA FGAENGIRRV | |
| | RILKPDASVV TIADRRTGVP YRAVAPGENH HVDIVQMRDG SWRGFAASVF | |
| | EVNRPGWRPE WEVKKLGGKL VMRLHKGDMV ELSDKDGQRR VKVVQQIEIS | |
| | ANRVRLSPHN DGGKLQDRHA DADDPFRWDL ATIPLLKDRG CVAVRVDPIG | |
| | WTLRRSNV | |
| Bifidobacterium | MSRKNYVDDY AISLDIGNAS VGWSAFTPNY RLVRAKGHEL IGVRLFDPAD | (SEQ |
| bifidum S17 | TAESRRMART TRRRYSRRRW RLRLLDALFD QALSEIDPSF LARRKYSWVH | ID NO: |
| WP_01336299 | PDDENNADCW YGSVLFDSNE QDKRFYEKYP TIYHLRKALM EDDSQHDIRE | 64) |
| 5.1 | IYLAIHHMVK YRGNFLVEGT LESSNAFKED ELLKLLGRIT RYEMSEGEQN | |
| | SDIEQDDENK LVAPANGQLA DALCATRGSR SMRVDNALEA LSAVNDLSRE | |
| | QRAIVKAIFA GLEGNKLDLA KIFVSKEFSS ENKKILGIYF NKSDYEEKCV | |
| | QIVDSGLLDD EEREFLDRMQ GQYNAIALKQ LLGRSTSVSD SKCASYDAHR | |
| | ANWNLIKLQL RTKENEKDIN ENYGILVGWK IDSGQRKSVR GESAYENMRK | |
| | KANVFFKKMI ETSDLSETDK NRLIHDIEED KLFPIQRDSD NGVIPHQLHQ | |
| | NELKQIIKKQ GKYYPFLLDA FEKDGKQINK IEGLLTFRVP YFVGPLVVPE | |
| | DLQKSDNSEN HWMVRKKKGE ITPWNFDEMV DKDASGRKFI ERLVGTDSYL | |
| | LGEPTLPKNS LLYQEYEVLN ELNNVRLSVR TGNHWNDKRR MRLGREEKTL | |
| | LCQRLFMKGQ TVTKRTAENL LRKEYGRTYE LSGLSDESKF TSSLSTYGKM | |
| | CRIFGEKYVN EHRDLMEKIV ELQTVFEDKE TLLHQLRQLE GISEADCALL | |
| | VNTHYTGWGR LSRKLLTTKA GECKISDDFA PRKHSIIEIM RAEDRNLMEI | |
| | ITDKQLGFSD WIEQENLGAE NGSSLMEVVD DLRVSPKVKR GIIQSIRLID | |
| | DISKAVGKRP SRIFLELADD IQPSGRTISR KSRLQDLYRN ANLGKEFKGI | |
| | ADELNACSDK DLQDDRLFLY YTQLGKDMYT GEELDLDRLS SAYDIDHIIP | |
| | QAVTQNDSID NRVLVARAEN ARKTDSFTYM PQIADRMRNF WQILLDNGLI | |
| | SRVKFERLTR QNEFSEREKE RFVQRSLVET RQIMKNVATL MRQRYGNSAA | |
| | VIGLNAELTK EMHRYLGFSH KNRDINDYHH AQDALCVGIA GQFAANRGFF | |
| | ADGEVSDGAQ NSYNQYLRDY LRGYREKLSA EDRKQGRAFG FIVGSMRSQD | |
| | EQKRVNPRTG EVVWSEEDKD YLRKVMNYRK MLVTQKVGDD FGALYDETRY | |
| | AATDPKGIKG IPFDGAKQDT SLYGGFSSAK PAYAVLIESK GKTRLVNVTM | |
| | QEYSLLGDRP SDDELRKVLA KKKSEYAKAN ILLRHVPKMQ LIRYGGGLMV | |
| | IKSAGELNNA QQLWLPYEEY CYFDDLSQGK GSLEKDDLKK LLDSILGSVQ | |
| | CLYPWHRFTE EELADLHVAF DKLPEDEKKN VITGIVSALH ADAKTANLSI | |
| | VGMTGSWRRM NNKSGYTFSD EDEFIFQSPS GLFEKRVTVG ELKRKAKKEV | |
| | NSKYRTNEKR LPTLSGASQP | |
| Barnesiella | MKNILGLDLG LSSIGWSVIR ENSEEQELVA MGSRVVSLTA AELSSFTQGN | (SEQ |
| intestinihominis | GVSINSQRTQ KRTQRKGYDR YQLRRTLLRN KLDTLGMLPD DSLSYLPKLQ | ID NO: |
| YIT 11860 | LWGLRAKAVT QRIELNELGR VLLHLNQKRG YKSIKSDFSG DKKITDYVKT | 65) |
| WP_ | VKTRYDELKE MRLTIGELFF RRLTENAFFR CKEQVYPRQA YVEEFDCIMN | |
| 008863245.1 | CQRKFYPDIL TDETIRCIRD EIIYYQRPLK SCKYLVSRCE FEKRFYLNAA | |
| | GKKTEAGPKV SPRTSPLFQV CRLWESINNI WKDRRNEIV FISAEQRAAL | |
| | FDFLNTHEKL KGSDLLKLLG LSKTYGYRLG EQFKTGIQGN KTRVEIERAL | |
| | GNYPDKKRLL QFNLQEESSS MVNTETGEII PMISLSFEQE PLYRLWHVLY | |
| | SIDDREQLQS VLRQKFGIDD DEVLERLSAI DLVKAGFGNK SSKAIRRILP | |
| | FLQLGMNYAE ACEAAGYNHS NNYTKAENEA RALLDRLPAI KKNELRQPWV | |
| | EKILNQMVNV VNALMEKYGR FDEIRVELAR ELKQSKEERS NTYKSINKNQ | |
| | RENEQIAKRI VEYGVPTRSR IQKYKMWEES KHCCIYCGQP VDVGDFLRGF | |
| | DVEVEHIIPK SLYFDDSFAN KVCSCRSCNK EKNNRTAYDY MKSKGEKALS | |
| | DYVERVNTMY TNNQISKTKW QNLLTPVDKI SIDFIDRQLR ESQYIARKAK | |
| | EILTSICYNV TATSGSVTSF LRHVWGWDTV LHDLNFDRYK KVGLTEVIEV | |
| | NHRGSVIRRE QIKDWSKRED HRHHAIDALT IACTKQAYIQ RLNNLRAEEG | |
| | PDFNKMSLER YIQSQPHFSV AQVREAVDRI LVSFRAGKRA VTPGKRYIRK | |
| | NRKRISVQSV LIPRGALSEE SVYGVIHVWE KDEQGHVIQK QRAVMKYPIT | |
| | SINREMLDKE KWVDKRIHRI LSGRLAQYND NPKEAFAKPV YIDKECRIPI | |
| | RTVRCFAKPA INTLVPLKKD DKGNPVAWVN PGNNHHVAIY RDEDGKYKER | |
| | TVTFWEAVDR CRVGIPAIVT QPDTIWDNIL QRNDISENVL ESLPDVKWQF | |
| | VLSLQQNEMF ILGMNEEDYR YAMDQQDYAL LNKYLYRVQK LSKSDYSFRY | |
| | HTETSVEDKY DGKPNLKLSM QMGKLKRVSI KSLLGLNPHK VHISVLGEIK | |
| | EIS | |
| Aminomonas | MIGEHVRGGC LFDDHWTPNW GAFRLPNTVR TFTKAENPKD GSSLAEPRRQ | (SEQ |
| paucivorans | ARGLRRRLRR KTQRLEDLRR LLAKEGVLSL SDLETLFRET PAKDPYQLRA | ID NO: |
| DSM 12260 | EGLDRPLSFP EWVRVLYHIT KHRGFQSNRR NPVEDGQERS RQEEEGKLLS | 66) |
| WP_ | GVGENERLLR EGGYRTAGEM LARDPKFQDH RRNRAGDYSH TLSRSLLLEE | |
| 006299850.1 | ARRLFQSQRT LGNPHASSNL EEAFLHLVAF QNPFASGEDI RNKAGHCSLE | |
| | PDQIRAPRRS ASAETFMLLQ KTGNLRLIHR RTGEERPLTD KEREQIHLLA | |
| | WKQEKVTHKT LRRHLEIPEE WLFTGLPYHR SGDKAEEKLF VHLAGIHEIR | |
| | KALDKGPDPA VWDTLRSRRD LLDSIADTLT FYKNEDEILP RLESLGLSPE | |
| | NARALAPLSF SGTAHLSLSA LGKLLPHLEE GKSYTQARAD AGYAAPPPDR | |
| | HPKLPPLEEA DWRNPVVFRA LTQTRKVVNA LVRRYGPPWC IHLETARELS | |
| | QPAKVRRRIE TEQQANEKKK QQAEREFLDI VGTAPGPGDL LKMRLWREQG | |
| | GFCPYCEEYL NPTRLAEPGY AEMDHILPYS RSLDNGWHNR VLVHGKDNRD | |
| | KGNRTPFEAF GGDTARWDRL VAWVQASHLS APKKRNLLRE DFGEEAEREL | |
| | KDRNLTDTRF ITKTAATLLR DRLTFHPEAP KDPVMTLNGR LTAFLRKQWG | |
| | LHKNRKNGDL HHALDAAVLA VASRSFVYRL SSHNAAWGEL PRGREAENGF | |
| | SLPYPAFRSE VLARLCPTRE EILLRLDQGG VGYDEAFRNG LRPVFVSRAP | |
| | SRRLRGKAHM ETLRSPKWKD HPEGPRTASR IPLKDLNLEK LERMVGKDRD | |
| | RKLYEALRER LAAFGGNGKK AFVAPFRKPC RSGEGPLVRS LRIFDSGYSG | |
| | VELRDGGEVY AVADHESMVR VDVYAKKNRF YLVPVYVADV ARGIVKNRAI | |
| | VAHKSEEEWD LVDGSFDFRF SLFPGDLVEI EKKDGAYLGY YKSCHRGDGR | |
| | LLLDRHDRMP RESDCGTFYV STRKDVLSMS KYQVDPLGEI RLVGSEKPPF | |
| | VL | |
| Ralstonia | MAEKQHRWGL DIGTNSIGWA VIALIEGRPA GLVATGSRIF SDGRNPKDGS | (SEQ |
| syzygii R24 | SLAVERRGPR QMRRRRDRYL RRRDRFMQAL INVGLMPGDA AARKALVTEN | ID NO: |
| CCA84553.1 | PYVLRQRGLD QALTLPEFGR ALFHLNQRRG FQSNRKTDRA TAKESGKVKN | 67) |
| | AIAAFRAGMG NARTVGEALA RRLEDGRPVR ARMVGQGKDE HYELYIAREW | |
| | IAQEFDALWA SQQRFHAEVL ADAARDRLRA ILLFQRKLLP VPVGKCFLEP | |
| | NQPRVAAALP SAQRFRLMQE LNHLRVMTLA DKRERPLSFQ ERNDLLAQLV | |
| | ARPKCGFDML RKIVFGANKE AYRFTIESER RKELKGCDTA AKLAKVNALG | |
| | TRWQALSLDE QDRLVCLLLD GENDAVLADA LREHYGLTDA QIDTLLGLSF | |
| | EDGHMRLGRS ALLRVLDALE SGRDEQGLPL SYDKAVVAAG YPAHTADLEN | |
| | GERDALPYYG ELLWRYTQDA PTAKNDAERK FGKIANPTVH IGLNQLRKLV | |
| | NALIQRYGKP AQIVVELARN LKAGLEEKER IKKQQTANLE RNERIRQKLQ | |
| | DAGVPDNREN RLRMRLFEEL GQGNGLGTPC IYSGRQISLQ RLFSNDVQVD | |
| | HILPFSKTLD DSFANKVLAQ HDANRYKGNR GPFEAFGANR DGYAWDDIRA | |
| | RAAVLPRNKR NRFAETAMQD WLHNETDFLA RQLTDTAYLS RVARQYLTAI | |
| | CSKDDVYVSP GRLTAMLRAK WGLNRVLDGV MEEQGRPAVK NRDDHRHHAI | |
| | DAVVIGATDR AMLQQVATLA ARAREQDAER LIGDMPTPWP NFLEDVRAAV | |
| | ARCVVSHKPD HGPEGGLHND TAYGIVAGPF EDGRYRVRHR VSLFDLKPGD | |
| | LSNVRCDAPL QAELEPIFEQ DDARAREVAL TALAERYRQR KVWLEELMSV | |
| | LPIRPRGEDG KTLPDSAPYK AYKGDSNYCY ELFINERGRW DGELISTFRA | |
| | NQAAYRRFRN DPARFRRYTA GGRPLLMRLC INDYIAVGTA AERTIFRVVK | |
| | MSENKITLAE HFEGGTLKQR DADKDDPFKY LTKSPGALRD LGARRIFVDL | |
| | IGRVLDPGIK GD | |
| Catenibacterium | IVDYCIGLDL GTGSVGWAVV DMNHRLMKRN GKHLWGSRLF SNAETAANRR | (SEQ |
| mitsuokai | ASRSIRRRYN KRRERIRLLR AILQDMVLEK DPTFFIRLEH TSFLDEEDKA | ID NO: |
| DSM 15897 | KYLGTDYKDN YNLFIDEDFN DYTYYHKYPT IYHLRKALCE STEKADPRLI | 68) |
| WP_ | YLALHHIVKY RGNFLYEGQK FNMDASNIED KLSDIFTQFT SFNNIPYEDD | |
| 006506696.1 | EKKNLEILEI LKKPLSKKAK VDEVMTLIAP EKDYKSAFKE LVTGIAGNKM | |
| | NVTKMILCEP IKQGDSEIKL KFSDSNYDDQ FSEVEKDLGE YVEFVDALHN | |
| | VYSWVELQTI MGATHTDNAS ISEAMVSRYN KHHDDLKLLK DCIKNNVPNK | |
| | YFDMFRNDSE KSKGYYNYIN RPSKAPVDEF YKYVKKCIEK VDTPEAKQIL | |
| | NDIELENFLL KQNSRINGSV PYQMQLDEMI KIIDNQAEYY PILKEKREQL | |
| | LSILTFRIPY YFGPLNETSE HAWIKRLEGK ENQRILPWNY QDIVDVDATA | |
| | EGFIKRMRSY CTYFPDEEVL PKNSLIVSKY EVYNELNKIR VDDKLLEVDV | |
| | KNDIYNELFM KNKTVTEKKL KNWLVNNQCC SKDAEIKGFQ KENQFSTSLT | |
| | PWIDFTNIFG KIDQSNFDLI ENIIYDLTVF EDKKIMKRRL KKKYALPDDK | |
| | VKQILKLKYK DWSRLSKKLL DGIVADNRFG SSVTVLDVLE MSRLNLMEII | |
| | NDKDLGYAQM IEEATSCPED GKFTYEEVER LAGSPALKRG IWQSLQIVEE | |
| | ITKVMKCRPK YIYIEFERSE EAKERTESKI KKLENVYKDL DEQTKKEYKS | |
| | VLEELKGFDN TKKISSDSLF LYFTQLGKCM YSGKKLDIDS LDKYQIDHIV | |
| | PQSLVKDDSF DNRVLVVPSE NQRKLDDLVV PFDIRDKMYR FWKLLFDHEL | |
| | ISPKKFYSLI KTEYTERDEE RFINRQLVET RQITKNVTQI IEDHYSTTKV | |
| | AAIRANLSHE FRVKNHIYKN RDINDYHHAH DAYIVALIGG FMRDRYPNMH | |
| | DSKAVYSEYM KMFRKNKNDQ KRWKDGFVIN SMNYPYEVDG KLIWNPDLIN | |
| | EIKKCFYYKD CYCTTKLDQK SGQLFNLTVL SNDAHADKGV TKAVVPVNKN | |
| | RSDVHKYGGF SGLQYTIVAI EGQKKKGKKT ELVKKISGVP LHLKAASINE | |
| | KINYIEEKEG LSDVRIIKDN IPVNQMIEMD GGEYLLTSPT EYVNARQLVL | |
| | NEKQCALIAD IYNAIYKQDY DNLDDILMIQ LYIELTNKMK VLYPAYRGIA | |
| | EKFESMNENY WVISKEEKAN IIKQMLIVMH RGPQNGNIVY DDFKISDRIG | |
| | RLKTKNHNLN NIVFISQSPT GIYTKKYKL | |
| Mycoplasma | MLRLYCANNL VLNNVQNLWK YLLLLIFDKK IIFLFKIKVI LIRRYMENNN | (SEQ |
| synoviae 53 | KEKIVIGFDL GVASVGWSIV NAETKEVIDL GVRLFSEPEK ADYRRAKRTT | ID NO: |
| AOL40776.1 | RRLLRRKKFK REKFHKLILK NAEIFGLQSR NEILNVYKDQ SSKYRNILKL | 69) |
| | KINALKEEIK PSELVWILRD YLQNRGYFYK NEKLTDEFVS NSFPSKKLHE | |
| | HYEKYGFFRG SVKLDNKLDN KKDKAKEKDE EEESDAKKES EELIFSNKQW | |
| | INEIVKVFEN QSYLTESFKE EYLKLFNYVR PFNKGPGSKN SRTAYGVFST | |
| | DIDPETNKFK DYSNIWDKTI GKCSLFEEEI RAPKNLPSAL IFNLQNEICT | |
| | IKNEFTEFKN WWLNAEQKSE ILKFVFTELF NWKDKKYSDK KFNKNLQDKI | |
| | KKYLLNFALE NFNLNEEILK NRDLENDTVL GLKGVKYYEK SNATADAALE | |
| | FSSLKPLYVF IKFLKEKKLD LNYLLGLENT EILYFLDSIY LAISYSSDLK | |
| | ERNEWFKKLL KELYPKIKNN NLEIIENVED IFEITDQEKF ESFSKTHSLS | |
| | REAFNHIIPL LLSNNEGKNY ESLKHSNEEL KKRTEKAELK AQQNQKYLKD | |
| | NFLKEALVPL SVKTSVLQAI KIFNQIIKNF GKKYEISQVV IEMARELTKP | |
| | NLEKLLNNAT NSNIKILKEK LDQTEKFDDF TKKKFIDKIE NSVVFRNKLF | |
| | LWFEQDRKDP YTQLDIKINE IEDETEIDHV IPYSKSADDS WFNKLLVKKS | |
| | TNQLKKNKTV WEYYQNESDP EAKWNKFVAW AKRIYLVQKS DKESKDNSEK | |
| | NSIFKNKKPN LKFKNITKKL FDPYKDLGFL ARNLNDTRYA TKVFRDQLNN | |
| | YSKHHSKDDE NKLFKVVCMN GSITSFLRKS MWRKNEEQVY RFNFWKKDRD | |
| | QFFHHAVDAS IIAIFSLLTK TLYNKLRVYE SYDVQRREDG VYLINKETGE | |
| | VKKADKDYWK DQHNFLKIRE NAIEIKNVLN NVDFQNQVRY SRKANTKLNT | |
| | QLFNETLYGV KEFENNFYKL EKVNLFSRKD LRKFILEDLN EESEKNKKNE | |
| | NGSRKRILTE KYIVDEILQI LENEEFKDSK SDINALNKYM DSLPSKFSEF | |
| | FSQDFINKCK KENSLILTFD AIKHNDPKKV IKIKNLKFFR EDATLKNKQA | |
| | VHKDSKNQIK SFYESYKCVG FIWLKNKNDL EESIFVPINS RVIHFGDKDK | |
| | DIFDFDSYNK EKLLNEINLK RPENKKFNSI NEIEFVKFVK PGALLLNFEN | |
| | QQIYYISTLE SSSLRAKIKLLNKMDKGKAVS MKKITNPDEY KIIEHVNPL | |
| | GINLNWTKKL ENNN | |
| Flavobacterium | MAKILGLDLG TNSIGWAVVE RENIDFSLID KGVRIFSEGV KSEKGIESSR | (SEQ |
| branchiophilum | AAERTGYRSA RKIKYRRKLR KYETLKVLSL NRMCPLSIEE VEEWKKSGFK | ID NO: |
| FL-15 | DYPLNPEFLK WLSTDEESNV NPYFFRDRAS KHKVSLFELG RAFYHIAQRR | 70) |
| WP_01408415 | GFLSNRLDQS AEGILEEHCP KIEAIVEDLI SIDEISTNIT DYFFETGILD | |
| 1.1 | SNEKNGYAKD LDEGDKKLVS LYKSLLAILK KNESDFENCK SEIIERLNKK | |
| | DVLGKVKGKI KDISQAMLDG NYKTLGQYFY SLYSKEKIRN QYTSREEHYL | |
| | SEFITICKVQ GIDQINEEEK INEKKFDGLA KDLYKAIFFQ RPLKSQKGLI | |
| | GKCSFEKSKS RCAISHPDFE EYRMWTYLNT IKIGTQSDKK LRFLTQDEKL | |
| | KLVPKFYRKN DFNFDVLAKE LIEKGSSFGF YKSSKKNDFF YWFNYKPTDT | |
| | VAACQVAASL KNAIGEDWKT KSFKYQTINS NKEQVSRTVD YKDLWHLLTV | |
| | ATSDVYLYEF AIDKLGLDEK NAKAFSKTKL KKDFASLSLS AINKILPYLK | |
| | EGLLYSHAVF VANIENIVDE NIWKDEKQRD YIKTQISEII ENYTLEKSRF | |
| | EIINGLLKEY KSENEDGKRV YYSKEAEQSF ENDLKKKLVL FYKSNEIENK | |
| | EQQETIFNEL LPIFIQQLKD YEFIKIQRLD QKVLIFLKGK NETGQIFCTE | |
| | EKGTAEEKEK KIKNRLKKLY HPSDIEKFKK KIIKDEFGNE KIVLGSPLTP | |
| | SIKNPMAMRA LHQLRKVLNA LILEGQIDEK TIIHIEMARE LNDANKRKGI | |
| | QDYQNDNKKF REDAIKEIKK LYFEDCKKEV EPTEDDILRY QLWMEQNRSE | |
| | IYEEGKNISI CDIIGSNPAY DIEHTIPRSR SQDNSQMNKT LCSQRFNREV | |
| | KKQSMPIELN NHLEILPRIA HWKEEADNLT REIEIISRSI KAAATKEIKD | |
| | KKIRRRHYLT LKRDYLQGKY DRFIWEEPKV GFKNSQIPDT GIITKYAQAY | |
| | LKSYFKKVES VKGGMVAEFR KIWGIQESFI DENGMKHYKV KDRSKHTHHT | |
| | IDAITIACMT KEKYDVLAHA WTLEDQQNKK EARSIIEASK PWKTFKEDLL | |
| | KIEEEILVSH YTPDNVKKQA KKIVRVRGKK QFVAEVERDV NGKAVPKKAA | |
| | SGKTIYKLDG EGKKLPRLQQ GDTIRGSLHQ DSIYGAIKNP LNTDEIKYVI | |
| | RKDLESIKGS DVESIVDEVV KEKIKEAIAN KVLLLSSNAQ QKNKLVGTVW | |
| | MNEEKRIAIN KVRIYANSVK NPLHIKEHSL LSKSKHVHKQ KVYGQNDENY | |
| | AMAIYELDGK RDFELINIFN LAKLIKQGQG FYPLHKKKEI KGKIVFVPIE | |
| | KRNKRDVVLK RGQQVVFYDK EVENPKDISE IVDFKGRIYI IEGLSIQRIV | |
| | RPSGKVDEYG VIMLRYFKEA RKADDIKQDN FKPDGVFKLG ENKPTRKMNH | |
| | NQFTAFVEGI DFKVLPSGKF EKI | |
| Eubacterium | MENKQYYIGL DVGTNSVGWA VTDTSYNLLR AKGKDMWGAR LFEKANTAAE | (SEQ |
| yurii subsp. | RRTKRTSRRR SEREKARKAM LKELFADEIN RVDPSFFIRL EESKFFLDDR | ID NO: |
| margaretiae | SENNRQRYTL FNDATFTDKD YYEKYKTIFH LRSALINSDE KFDVRLVFLA | 71) |
| ATCC 43715 | ILNLFSHRGH FLNASLKGDG DIQGMDVFYN DLVESCEYFE IELPRITNID | |
| EFM38267.1 | NFEKILSQKG KSRTKILEEL SEELSISKKD KSKYNLIKLI SGLEASVVEL | |
| | YNIEDIQDEN KKIKIGFRES DYEESSLKVK EIIGDEYFDL VERAKSVHDM | |
| | GLLSNIIGNS KYLCEARVEA YENHHKDLLK IKELLKKYDK KAYNDMFRKM | |
| | TDKNYSAYVG SVNSNIAKER RSVDKRKIED LYKYIEDTAL KNIPDDNKDK | |
| | IEILEKIKLG EFLKKQLTAS NGVIPNQLQS RELRAILKKA ENYLPFLKEK | |
| | GEKNLTVSEM IIQLFEFQIP YYVGPLDKNP KKDNKANSWA KIKQGGRILP | |
| | WNFEDKVDVK GSRKEFIEKM VRKCTYISDE HTLPKQSLLY EKFMVLNEIN | |
| | NIKIDGEKIS VEAKQKIYND LFVKGKKVSQ KDIKKELISL NIMDKDSVLS | |
| | GTDTVCNAYL SSIGKFTGVF KEEINKQSIV DMIEDIIFLK TVYGDEKRFV | |
| | KEEIVEKYGD EIDKDKIKRI LGFKFSNWGN LSKSFLELEG ADVGTGEVRS | |
| | IIQSLWETNF NLMELLSSRF TYMDELEKRV KKLEKPLSEW TIEDLDDMYL | |
| | SSPVKRMIWQ SMKIVDEIQT VIGYAPKRIF VEMTRSEGEK VRTKSRKDRL | |
| | KELYNGIKED SKQWVKELDS KDESYFRSKK MYLYYLQKGR CMYSGEVIEL | |
| | DKLMDDNLYD IDHIYPRSFV KDDSLDNLVL VKKEINNRKQ NDPITPQIQA | |
| | SCQGFWKILH DQGFMSNEKY SRLTRKTQEF SDEEKLSFIN RQIVETGQAT | |
| | KCMAQILQKS MGEDVDVVFS KARLVSEFRH KFELFKSRLI NDFHHANDAY | |
| | LNIVVGNSYF VKFTRNPANF IKDARKNPDN PVYKYHMDRF FERDVKSKSE | |
| | VAWIGQSEGN SGTIVIVKKT MAKNSPLITK KVEEGHGSIT KETIVGVKEI | |
| | KFGRNKVEKA DKTPKKPNLQ AYRPIKTSDE RLCNILRYGG RTSISISGYC | |
| | LVEYVKKRKT IRSLEAIPVY LGRKDSLSEE KLLNYFRYNL NDGGKDSVSD | |
| | IRLCLPFIST NSLVKIDGYL YYLGGKNDDR IQLYNAYQLK MKKEEVEYIR | |
| | KIEKAVSMSK FDEIDREKNP VLTEEKNIEL YNKIQDKFEN TVFSKRMSLV | |
| | KYNKKDLSFG DFLKNKKSKF EEIDLEKQCK VLYNIIFNLS NLKEVDLSDI | |
| | GGSKSTGKCR CKKNITNYKE FKLIQQSITG LYSCEKDLMT I | |
| Acidovorax | MAQHVFGLDI GIASVGWAIL GEQRIIDLGV RCFDKAETAK EGDPLNLTRR | (SEQ |
| ebreus | QARLLRRRLY RRAWRLTQLS RLLKRKGLIA DAKLFAKAPS YGDSAWELRR | ID NO: |
| WP_01265517 | QGLDRLLTPL EWARVIYHQC KHRGFHWTSK AEEAKADSDA EGGRVKQGLA | 72) |
| 6.1 | HTKALMQAKN YRSAAEMVLA EFPDAQRNKR GQYDKALSRV LLGEELALLF | |
| | ATQRRLGNPH ASDFFEKLIL GDGDRKSGLF WQQKPALSGA DLLKMLGKCT | |
| | FEKGEYRAPK ASFSVERHVW LTRLNNLRIV VDGRSRPLNE AERQAALLLP | |
| | YQTETSKYKT LKNAFIKAGL WGDGVRFGGL AYPSQAQIDA EKTKDPEDQF | |
| | LVKLPAWHEL RKAFKAAGHE ALWQQISTPA LDGDPTLLDQ IATVLSVYKD | |
| | GAEVVQQLRQ LALPEPAASI AVLEKISFDK FSSLSLKALR RIVPLMQSGL | |
| | RYDEAVAQIP EYGHHSQRIE PGAAKHLYLP PFYEAQRKYA GKGDHIGSMQ | |
| | FRDDADIPRN PWVLRALNQA RKVVNALIRE YGSPIAVNIE MARDLSRPLD | |
| | ERNKVKRAQE EFRDRNDRAR SEFERDFGYK PKAAAFEKWM LYREQLGQCA | |
| | YSQQPLDIQR VLDDHNYAQV DHALPYSRSY DDSKNNKVLV LTHENQNKGN | |
| | RTAFEYLTSF PDGEDGERWR TFVAWVQGNK AYRMAKRNRL LRKNYGVDES | |
| | KGFIDRNLND TRYICKFFKN YVEEHLQLAA RADGDTARRC VVVNGQLTAF | |
| | LRARWGLTKV RGDSDRHHAL DAAVVAACTH GMVKALADYS RRKEISFLQE | |
| | GFPDPETGEI LNPAAFDRAR QHFPEPWTHF AHELKARLFT DDLAALREDM | |
| | QRLGSYTTED LGRLRTLFVS RAPQRRSGGA VHKETIYAQP ESLKQQGGVI | |
| | EKILLTSLKL QDFDKLLNPE SNDHFVEPHR NERLYAAIRQ RLEQFGGRAD | |
| | KAFGPDNLFH KPDKNNQPTG PVVRSIKLVR GKQTGIPIRG GLAKNDSMLR | |
| | VDIFTKAGKF HLVPVYVHHR VTGLPNRAIV AFKDEDEWTL IDESFAFLFS | |
| | VYPNDYVKVT LKKEQQSGYY SGADRSTGAM NLWAHDRAAS VGKDGLIRGI | |
| | GVKTALSVEK FNVDVLGRIY LAPPETRSGL A | |
| Porphyromonas | MLMSKHVLGL DLGVGSIGWC LIALDAQGDP AEILGMGSRV VPLNNATKAI | (SEQ |
| sp. oral taxon | EAFNAGAAFT ASQERTARRT MRRGFARYQL RRYRLRRELE KVGMLPDAAL | ID NO: |
| 279 str. F0450 | IQLPLLELWE LRERAATAGR RLTLPELGRV LCHINQKRGY RHVKSDAAAI | 73) |
| WP_00943351 | VGDEGEKKKD SNSAYLAGIR ANDEKLQAEH KTVGQYFAEQ LRQNQSESPT | |
| 8.1 | GGISYRIKDQ IFSRQCYIDE YDQIMAVQRV HYPDILTDEF IRMLRDEVIF | |
| | MQRPLKSCKH LVSLCEFEKQ ERVMRVQQDD GKGGWQLVER RVKFGPKVAP | |
| | KSSPLFQLCC IYEAVNNIRL TRPNGSPCDI TPEERAKIVA HLQSSASLSF | |
| | AALKKLLKEK ALIADQLTSK SGLKGNSTRV ALASALQPYP QYHHLLDMEL | |
| | ETRMMTVQLT DEETGEVTER EVAWTDSYV RKPLYRLWHI LYSIEEREAM | |
| | RRALITQLGM KEEDLDGGLL DQLYRLDFVK PGYGNKSAKF ICKLLPQLQQ | |
| | GLGYSEACAA VGYRHSNSPT SEEITERTLL EKIPLLQRNE LRQPLVEKIL | |
| | NQMINLVNAL KAEYGIDEVR VELARELKMS REERERMARN NKDREERNKG | |
| | VAAKIRECGL YPTKPRIQKY MLWKEAGRQC LYCGRSIEEE QCLREGGMEV | |
| | EHIIPKSVLY DDSYGNKTCA CRRCNKEKGN RTALEYIRAK GREAEYMKRI | |
| | NDLLKEKKIS YSKHQRLRWL KEDIPSDFLE RQLRLTQYIS RQAMAILQQG | |
| | IRRVSASEGG VTARLRSLWG YGKILHTLNL DRYDSMGETE RVSREGEATE | |
| | ELHITNWSKR MDHRHHAIDA LVVACTRQSY IQRLNRLSSE FGREDKKKED | |
| | QEAQEQQATE TGRLSNLERW LTQRPHFSVR TVSDKVAEIL ISYRPGQRVV | |
| | TRGRNIYRKK MADGREVSCV QRGVLVPRGE LMEASFYGKI LSQGRVRIVK | |
| | RYPLHDLKGE VVDPHLRELI TTYNQELKSR EKGAPIPPLC LDKDKKQEVR | |
| | SVRCYAKTLS LDKAIPMCFD EKGEPTAFVK SASNHHLALY RTPKGKLVES | |
| | IVTFWDAVDR ARYGIPLVIT HPREVMEQVL QRGDIPEQVL SLLPPSDWVF | |
| | VDSLQQDEMV VIGLSDEELQ RALEAQNYRK ISEHLYRVQK MSSSYYVFRY | |
| | HLETSVADDK NTSGRIPKFH RVQSLKAYEE RNIRKVRVDL LGRISLL | |
| Mycoplasma | MHNKKNITIG FDLGIASIGW AIIDSTTSKI LDWGTRTFEE RKTANERRAF | (SEQ |
| ovipneumoniae | RSTRRNIRRK AYRNQRFINL ILKYKDLFEL KNISDIQRAN KKDTENYEKI | ID NO: |
| SC01 | ISFFTEIYKK CAAKHSNILE VKVKALDSKI EKLDLIWILH DYLENRGFFY | 74) |
| WP_01032092 | DLEEENVADK YEGIEHPSIL LYDFFKKNGF FKSNSSIPKD LGGYSFSNLQ | |
| 2.1 | WVNEIKKLFE VQEINPEFSE KFLNLFTSVR DYAKGPGSEH SASEYGIFQK | |
| | DEKGKVFKKY DNIWDKTIGK CSFFVEENRS PVNYPSYEIF NLLNQLINLS | |
| | TDLKTTNKKI WQLSSNDRNE LLDELLKVKE KAKIISISLK KNEIKKIILK | |
| | DFGFEKSDID DQDTIEGRKI IKEEPTTKLE VTKHLLATIY SHSSDSNWIN | |
| | INNILEFLPY LDAICIILDR EKSRGQDEVL KKLTEKNIFE VLKIDREKQL | |
| | DFVKSIFSNT KFNFKKIGNF SLKAIREFLP KMFEQNKNSE YLKWKDEEIR | |
| | RKWEEQKSKL GKTDKKTKYL NPRIFQDEII SPGTKNTFEQ AVLVLNQIIK | |
| | KYSKENIIDA IIIESPREKN DKKTIEEIKK RNKKGKGKTL EKLFQILNLE | |
| | NKGYKLSDLE TKPAKLLDRL RFYHQQDGID LYTLDKINID QLINGSQKYE | |
| | IEHIIPYSMS YDNSQANKIL TEKAENLKKG KLIASEYIKR NGDEFYNKYY | |
| | EKAKELFINK YKKNKKLDSY VDLDEDSAKN RFRFLTLQDY DEFQVEFLAR | |
| | NLNDTRYSTK LFYHALVEHF ENNEFFTYID ENSSKHKVKI STIKGHVTKY | |
| | FRAKPVQKNN GPNENLNNNK PEKIEKNREN NEHHAVDAAI VAIIGNKNPQ | |
| | IANLLTLADN KTDKKFLLHD ENYKENIETG ELVKIPKFEV DKLAKVEDLK | |
| | KIIQEKYEEA KKHTAIKFSR KTRTILNGGL SDETLYGFKY DEKEDKYFKI | |
| | IKKKLVTSKN EELKKYFENP FGKKADGKSE YTVLMAQSHL SEFNKLKEIF | |
| | EKYNGFSNKT GNAFVEYMND LALKEPTLKA EIESAKSVEK LLYYNFKPSD | |
| | QFTYHDNINN KSFKRFYKNI RIIEYKSIPI KFKILSKHDG GKSFKDTLFS | |
| | LYSLVYKVYE NGKESYKSIP VTSQMRNFGI DEFDFLDENL YNKEKLDIYK | |
| | SDFAKPIPVN CKPVFVLKKG SILKKKSLDI DDFKETKETE EGNYYFISTI | |
| | SKRFNRDTAY GLKPLKLSVV KPVAEPSTNP IFKEYIPIHL DELGNEYPVK | |
| | IKEHTDDEKL MCTIK | |
| Wolinella | MLVSPISVDL GGKNTGFFSF TDSLDNSQSG TVIYDESFVL SQVGRRSKRH | (SEQ |
| succinogenes | SKRNNLRNKL VKRLFLLILQ EHHGLSIDVL PDEIRGLFNK RGYTYAGFEL | ID NO: |
| WP_01113943 | DEKKKDALES DTLKEFLSEK LQSIDRDSDV EDFLNQIASN AESFKDYKKG | 75) |
| 1.1 | FEAVFASATH SPNKKLELKD ELKSEYGENA KELLAGLRVT KEILDEFDKQ | |
| | ENQGNLPRAK YFEELGEYIA TNEKVKSFFD SNSLKLTDMT KLIGNISNYQ | |
| | LKELRRYFND KEMEKGDIWI PNKLHKITER FVRSWHPKND ADRQRRAELM | |
| | KDLKSKEIME LLTTTEPVMT IPPYDDMNNR GAVKCQTLRL NEEYLDKHLP | |
| | NWRDIAKRLN HGKFNDDLAD STVKGYSEDS TLLHRLLDTS KEIDIYELRG | |
| | KKPNELLVKT LGQSDANRLY GFAQNYYELI RQKVRAGIWV PVKNKDDSLN | |
| | LEDNSNMLKR CNHNPPHKKN QIHNLVAGIL GVKLDEAKFA EFEKELWSAK | |
| | VGNKKLSAYC KNIEELRKTH GNTFKIDIEE LRKKDPAELS KEEKAKLRLT | |
| | DDVILNEWSQ KIANFFDIDD KHRQRFNNLF SMAQLHTVID TPRSGFSSTC | |
| | KRCTAENRFR SETAFYNDET GEFHKKATAT CQRLPADTQR PFSGKIERYI | |
| | DKLGYELAKI KAKELEGMEA KEIKVPIILE QNAFEYEESL RKSKTGSNDR | |
| | VINSKKDRDG KKLAKAKENA EDRLKDKDKR IKAFSSGICP YCGDTIGDDG | |
| | EIDHILPRSH TLKIYGTVFN PEGNLIYVHQ KCNQAKADSI YKLSDIKAGV | |
| | SAQWIEEQVA NIKGYKTFSV LSAEQQKAFR YALFLQNDNE AYKKVVDWLR | |
| | TDQSARVNGT QKYLAKKIQE KLTKMLPNKH LSFEFILADA TEVSELRRQY | |
| | ARQNPLLAKA EKQAPSSHAI DAVMAFVARY QKVFKDGTPP NADEVAKLAM | |
| | LDSWNPASNE PLTKGLSTNQ KIEKMIKSGD YGQKNMREVF GKSIFGENAI | |
| | GERYKPIVVQ EGGYYIGYPA TVKKGYELKN CKVVTSKNDI AKLEKIIKNQ | |
| | DLISLKENQY IKIFSINKQT ISELSNRYFN MNYKNLVERD KEIVGLLEFI | |
| | VENCRYYTKK VDVKFAPKYI HETKYPFYDD WRRFDEAWRY LQENQNKTSS | |
| | KDRFVIDKSS LNEYYQPDKN EYKLDVDTQP IWDDFCRWYF LDRYKTANDK | |
| | KSIRIKARKT FSLLAESGVQ GKVFRAKRKI PTGYAYQALP MDNNVIAGDY | |
| | ANILLEANSK TLSLVPKSGI SIEKQLDKKL DVIKKTDVRG LAIDNNSFFN | |
| | ADFDTHGIRL IVENTSVKVG NFPISAIDKS AKRMIFRALF EKEKGKRKKK | |
| | TTISFKESGP VQDYLKVFLK KIVKIQLRTD GSISNIWRK NAADFTLSFR | |
| | SEHIQKLLK | |
| Streptococcus | MKKPYSIGLD IGTNSVGWAV VTDDYKVPAK KMKVLGNTDK SHIEKNLLGA | (SEQ |
| mutans UA159 | LLFDSGNTAE DRRLKRTARR RYTRRRNRIL YLQEIFSEEM GKVDDSFFHR | ID NO: |
| WP_00226354 | LEDSFLVTED KRGERHPIFG NLEEEVKYHE NFPTIYHLRQ YLADNPEKVD | 76) |
| 9.1 | LRLVYLALAH IIKFRGHFLI EGKFDTRNND VQRLFQEFLA VYDNTFENSS | |
| | LQEQNVQVEE ILTDKISKSA KKDRVLKLFP NEKSNGRFAE FLKLIVGNQA | |
| | DFKKHFELEE KAPLQFSKDT YEEELEVLLA QIGDNYAELF LSAKKLYDSI | |
| | LLSGILTVTD VGTKAPLSAS MIQRYNEHQM DLAQLKQFIR QKLSDKYNEV | |
| | FSDVSKDGYA GYIDGKTNQE AFYKYLKGLL NKIEGSGYFL DKIEREDFLR | |
| | KQRTFDNGSI PHQIHLQEMR AIIRRQAEFY PFLADNQDRI EKLLTFRIPY | |
| | YVGPLARGKS DFAWLSRKSA DKITPWNFDE IVDKESSAEA FINRMTNYDL | |
| | YLPNQKVLPK HSLLYEKFTV YNELTKVKYK TEQGKTAFFD ANMKQEIFDG | |
| | VFKVYRKVTK DKLMDFLEKE FDEFRIVDLT GLDKENKVEN ASYGTYHDLC | |
| | KILDKDFLDN SKNEKILEDI VLTLTLFEDR EMIRKRLENY SDLLTKEQVK | |
| | KLERRHYTGW GRLSAELIHG IRNKESRKTI LDYLIDDGNS NRNFMQLIND | |
| | DALSFKEEIA KAQVIGETDN LNQVVSDIAG SPAIKKGILQ SLKIVDELVK | |
| | IMGHQPENIV VEMARENQFT NQGRRNSQQR LKGLTDSIKE FGSQILKEHP | |
| | VENSQLQNDR LFLYYLQNGR DMYTGEELDI DYLSQYDIDH IIPQAFIKDN | |
| | SIDNRVLTSS KENRGKSDDV PSKDVVRKMK SYWSKLLSAK LITQRKFDNL | |
| | TKAERGGLTD DDKAGFIKRQ LVETRQITKH VARILDERFN TETDENNKKI | |
| | RQVKIVTLKS NLVSNFRKEF ELYKVREIND YHHAHDAYLN AVIGKALLGV | |
| | YPQLEPEFVY GDYPHFHGHK ENKATAKKFF YSNIMNFFKK DDVRTDKNGE | |
| | IIWKKDEHIS NIKKVLSYPQ VNIVKKVEEQ TGGFSKESIL PKGNSDKLIP | |
| | RKTKKFYWDT KKYGGFDSPI VAYSILVIAD IEKGKSKKLK TVKALVGVTI | |
| | MEKMTFERDP VAFLERKGYR NVQEENIIKL PKYSLFKLEN GRKRLLASAR | |
| | ELQKGNEIVL PNHLGTLLYH AKNIHKVDEP KHLDYVDKHK DEFKELLDVV | |
| | SNFSKKYTLA EGNLEKIKEL YAQNNGEDLK ELASSFINLL TFTAIGAPAT | |
| | FKFFDKNIDR KRYTSTTEIL NATLIHQSIT GLYETRIDLN KLGGD | |
| Prevotella | MNKRILGLDT GTNSLGWAVV DWDEHAQSYE LIKYGDVIFQ EGVKIEKGIE | (SEQ |
| timonensis | SSKAAERSGY KAIRKQYFRR RLRKIQVLKV LVKYHLCPYL SDDDLRQWHL | ID NO: |
| CRIS 5C-B1 | QKQYPKSDEL MLWQRTSDEE GKNPYYDRHR CLHEKLDLTV EADRYTLGRA | |
| WP_00812271 | LYHLTQRRGF LSNRLDTSAD NKEDGVVKSG ISQLSTEMEE AGCEYLGDYF | |
| 8.1 | YKLYDAQGNK VRIRQRYTDR NKHYQHEFDA ICEKQELSSE LIEDLQRAIF | |
| | FQLPLKSQRH GVGRCTFERG KPRCADSHPD YEEFRMLCFV NNIQVKGPHD | 77) |
| | LELRPLTYEE REKIEPLFFR KSKPNFDFED IAKALAGKKN YAWIHDKEER | |
| | AYKFNYRMTQ GVPGCPTIAQ LKSIFGDDWK TGIAETYTLI QKKNGSKSLQ | |
| | EMVDDVWNVL YSFSSVEKLK EFAHHKLQLD EESAEKFAKI KLSHSFAALS | |
| | LKAIRKFLPF LRKGMYYTHA SFFANIPTIV GKEIWNKEQN RKYIMENVGE | |
| | LVFNYQPKHR EVQGTIEMLI KDFLANNFEL PAGATDKLYH PSMIETYPNA | |
| | QRNEFGILQL GSPRTNAIRN PMAMRSLHIL RRVVNQLLKE SIIDENTEVH | |
| | VEYARELNDA NKRRAIADRQ KEQDKQHKKY GDEIRKLYKE ETGKDIEPTQ | |
| | TDVLKFQLWE EQNHHCLYTG EQIGITDFIG SNPKFDIEHT IPQSVGGDST | |
| | QMNLTLCDNR FNREVKKAKL PTELANHEEI LTRIEPWKNK YEQLVKERDK | |
| | QRTFAGMDKA VKDIRIQKRH KLQMEIDYWR GKYERFTMTE VPEGFSRRQG | |
| | TGIGLISRYA GLYLKSLFHQ ADSRNKSNVY VVKGVATAEF RKMWGLQSEY | |
| | EKKQRDNHSH HCMDAITIAC IGKREYDLMA EYYRMEETFK QGRGSKPKFS | |
| | KPWATFTEDV LNIYKNLLVV HDTPNNMPKH TKKYVQTSIG KVLAQGDTAR | |
| | GSLHLDTYYG AIERDGEIRY VVRRPLSSFT KPEELENIVD ETVKRTIKEA | |
| | IADKNFKQAI AEPIYMNEEK GILIKKVRCF AKSVKQPINI RQHRDLSKKE | |
| | YKQQYHVMNE NNYLLAIYEG LVKNKVVREF EIVSYIEAAK YYKRSQDRNI | |
| | FSSIVPTHST KYGLPLKTKL LMGQLVLMFE ENPDEIQVDN TKDLVKRLYK | |
| | WGIEKDGRI KFKYHQEARK EGLPIFSTPY KNNDDYAPIF RQSINNINIL | |
| | VDGIDFTIDI LGKVTLKE | |
| Clostridium | MKYTLGLDVG IASVGWAVID KDNNKIIDLG VRCFDKAEES KTGESLATAR | (SEQ |
| cellulolyticum | RIARGMRRRI SRRSQRLRLV KKLFVQYEII KDSSEFNRIF DTSRDGWKDP | ID NO: |
| H10 | WELRYNALSR ILKPYELVQV LTHITKRRGF KSNRKEDLST TKEGWVITSI | 78) |
| ACL77411.1 | KNNSEMLRTK NYRTIGEMIF METPENSNKR NKVDEYIHTI AREDLLNEIK | |
| | YIFSIQRKLG SPFVTEKLEH DFLNIWEFQR PFASGDSILS KVGKCTLLKE | |
| | ELRAPTSCYT SEYFGLLQSI NNLVLVEDNN TLTLNNDQRA KIIEYAHFKN | |
| | EIKYSEIRKL LDIEPEILFK AHNLTHKNPS GNNESKKFYE MKSYHKLKST | |
| | LPTDIWGKLH SNKESLDNLF YCLTVYKNDN EIKDYLQANN LDYLIEYIAK | |
| | LPTFNKFKHL SLVAMKRIIP FMEKGYKYSD ACNMAELDFT GSSKLEKCNK | |
| | LTVEPIIENV TNPVVIRALT QARKVINAII QKYGLPYMVN IELAREAGMT | |
| | RQDRDNLKKE HENNRKAREK ISDLIRQNGR VASGLDILKW RLWEDQGGRC | |
| | AYSGKPIPVC DLLNDSLTQI DHIYPYSRSM DDSYMNKVLV LTDENQNKRS | |
| | YTPYEVWGST EKWEDFEARI YSMHLPQSKE KRLLNRNFIT KDLDSFISRN | |
| | LNDTRYISRF LKNYIESYLQ FSNDSPKSCV VCVNGQCTAQ LRSRWGLNKN | |
| | REESDLHHAL DAAVIACADR KIIKEITNYY NERENHNYKV KYPLPWHSFR | |
| | QDLMETLAGV FISRAPRRKI TGPAHDETIR SPKHFNKGLT SVKIPLTTVT | |
| | LEKLETMVKN TKGGISDKAV YNVLKNRLIE HNNKPLKAFA EKIYKPLKNG | |
| | TNGAIIRSIR VETPSYTGVF RNEGKGISDN SLMVRVDVFK KKDKYYLVPI | |
| | YVAHMIKKEL PSKAIVPLKP ESQWELIDST HEFLFSLYQN DYLVIKTKKG | |
| | ITEGYYRSCH RGTGSLSLMP HFANNKNVKI DIGVRTAISI EKYNVDILGN | |
| | KSIVKGEPRR GMEKYNSFKS N | |
| Francisella | MNFKILPIAI DLGVKNTGVF SAFYQKGTSL ERLDNKNGKV YELSKDSYTL | (SEQ |
| tularensis | LMNNRTARRH QRRGIDRKQL VKRLFKLIWT EQLNLEWDKD TQQAISFLFN | ID NO: |
| subsp. | RRGFSFITDG YSPEYLNIVP EQVKAILMDI FDDYNGEDDL DSYLKLATEQ | 79) |
| novicida U112 | ESKISEIYNK LMQKILEFKL MKLCTDIKDD KVSTKTLKEI TSYEFELLAD | |
| WP_00303894 | YLANYSESLK TQKFSYTDKQ GNLKELSYYH HDKYNIQEFL KRHATINDRI | |
| 1.1 | LDTLLTDDLD IWNFNFEKFD FDKNEEKLQN QEDKDHIQAH LHHFVFAVNK | |
| | IKSEMASGGR HRSQYFQEIT NVLDENNHQE GYLKNFCENL HNKKYSNLSV | |
| | KNLVNLIGNL SNLELKPLRK YFNDKIHAKA DHWDEQKFTE TYCHWILGEW | |
| | RVGVKDQDKK DGAKYSYKDL CNELKQKVTK AGLVDFLLEL DPCRTIPPYL | |
| | DNNNRKPPKC QSLILNPKFL DNQYPNWQQY LQELKKLQSI QNYLDSFETD | |
| | LKVLKSSKDQ PYFVEYKSSN QQIASGQRDY KDLDARILQF IFDRVKASDE | |
| | LLLNEIYFQA KKLKQKASSE LEKLESSKKL DEVIANSQLS QILKSQHTNG | |
| | IFEQGTFLHL VCKYYKQRQR ARDSRLYIMP EYRYDKKLHK YNNTGRFDDD | |
| | NQLLTYCNHK PRQKRYQLLN DLAGVLQVSP NFLKDKIGSD DDLFISKWLV | |
| | EHIRGFKKAC EDSLKIQKDN RGLLNHKINI ARNTKGKCEK EIFNLICKIE | |
| | GSEDKKGNYK HGLAYELGVL LFGEPNEASK PEFDRKIKKF NSIYSFAQIQ | |
| | QIAFAERKGN ANTCAVCSAD NAHRMQQIKI TEPVEDNKDK IILSAKAQRL | |
| | PAIPTRIVDG AVKKMATILA KNIVDDNWQN IKQVLSAKHQ LHIPIITESN | |
| | AFEFEPALAD VKGKSLKDRR KKALERISPE NIFKDKNNRI KEFAKGISAY | |
| | SGANLTDGDF DGAKEELDHI IPRSHKKYGT LNDEANLICV TRGDNKNKGN | |
| | RIFCLRDLAD NYKLKQFETT DDLEIEKKIA DTIWDANKKD FKFGNYRSFI | |
| | NLTPQEQKAF RHALFLADEN PIKQAVIRAI NNRNRTFVNG TQRYFAEVLA | |
| | NNIYLRAKKE NLNTDKISFD YFGIPTIGNG RGIAEIRQLY EKVDSDIQAY | |
| | AKGDKPQASY SHLIDAMLAF CIAADEHRND GSIGLEIDKN YSLYPLDKNT | |
| | GEVFTKDIFS QIKITDNEFS DKKLVRKKAI EGFNTHRQMT RDGIYAENYL | |
| | PILIHKELNE VRKGYTWKNS EEIKIFKGKK YDIQQLNNLV YCLKFVDKPI | |
| | SIDIQISTLE ELRNILTTNN IAATAEYYYI NLKTQKLHEY YIENYNTALG | |
| | YKKYSKEMEF LRSLAYRSER VKIKSIDDVK QVLDKDSNFI IGKITLPFKK | |
| | EWQRLYREWQ NTTIKDDYEF LKSFFNVKSI TKLHKKVRKD FSLPISTNEG | |
| | KFLVKRKTWD NNFIYQILND SDSRADGTKP FIPAFDISKN EIVEAIIDSF | |
| | TSKNIFWLPK NIELQKVDNK NIFAIDTSKW FEVETPSDLR DIGIATIQYK | |
| | IDNNSRPKVR VKLDYVIDDD SKINYFMNHS LLKSRYPDKV LEILKQSTII | |
| | EFESSGFNKT IKEMLGMKLA GIYNETSNN | |
| Azospirillum | MARPAFRAPR REHVNGWTPD PHRISKPFFI LVSWHLLSRV VIDSSSGCFP | (SEQ |
| sp. B510 | GTSRDHTDKF AEWECAVQPY RLSFDLGTNS IGWGLLNLDR QGKPREIRAL | ID NO: |
| AOL40891.1 | GSRIFSDGRD PQDKASLAVA RRLARQMRRR RDRYLTRRTR LMGALVRFGL | 80) |
| | MPADPAARKR LEVAVDPYLA RERATRERLE PFEIGRALFH LNQRRGYKPV | |
| | RTATKPDEEA GKVKEAVERL EAAIAAAGAP TLGAWFAWRK TRGETLRARL | |
| | AGKGKEAAYP FYPARRMLEA EFDTLWAEQA RHHPDLLTAE AREILRHRIF | |
| | HQRPLKPPPV GRCTLYPDDG RAPRALPSAQ RLRLFQELAS LRVIHLDLSE | |
| | RPLTPAERDR IVAFVQGRPP KAGRKPGKVQ KSVPFEKLRG LLELPPGTGF | |
| | SLESDKRPEL LGDETGARIA PAFGPGWTAL PLEEQDALVE LLLTEAEPER | |
| | AIAALTARWA LDEATAAKLA GATLPDFHGR YGRRAVAELL PVLERETRGD | |
| | PDGRVRPIRL DEAVKLLRGG KDHSDFSREG ALLDALPYYG AVLERHVAFG | |
| | TGNPADPEEK RVGRVANPTV HIALNQLRHL VNAILARHGR PEEIVIELAR | |
| | DLKRSAEDRR REDKRQADNQ KRNEERKRLI LSLGERPTPR NLLKLRLWEE | |
| | QGPVENRRCP YSGETISMRM LLSEQVDIDH ILPFSVSLDD SAANKVVCLR | |
| | EANRIKRNRS PWEAFGHDSE RWAGILARAE ALPKNKRWRF APDALEKLEG | |
| | EGGLRARHLN DTRHLSRLAV EYLRCVCPKV RVSPGRLTAL LRRRWGIDAI | |
| | LAEADGPPPE VPAETLDPSP AEKNRADHRH HALDAVVIGC IDRSMVQRVQ | |
| | LAAASAEREA AAREDNIRRV LEGFKEEPWD GFRAELERRA RTIVVSHRPE | |
| | HGIGGALHKE TAYGPVDPPE EGFNLVVRKP IDGLSKDEIN SVRDPRLRRA | |
| | LIDRLAIRRR DANDPATALA KAAEDLAAQP ASRGIRRVRV LKKESNPIRV | |
| | EHGGNPSGPR SGGPFHKLLL AGEVHHVDVA LRADGRRWVG HWVTLFEAHG | |
| | GRGADGAAAP PRLGDGERFL MRLHKGDCLK LEHKGRVRVM QVVKLEPSSN | |
| | SVVVVEPHQV KTDRSKHVKI SCDQLRARGA RRVTVDPLGR VRVHAPGARV | |
| | GIGGDAGRTA MEPAEDIS | |
| Peptoniphilus | MKNLKEYYIG LDIGTASVGW AVTDESYNIP KFNGKKMWGV RLFDDAKTAE | (SEQ |
| duerdenii | ERRTQRGSRR RLNRRKERIN LLQDLFATEI SKVDPNFFLR LDNSDLYRED | ID NO: |
| ATCC BAA- | KDEKLKSKYT LFNDKDFKDR DYHKKYPTIH HLIMDLIEDE GKKDIRLLYL | 81) |
| 1640 | ACHYLLKNRG HFIFEGQKFD TKNSFDKSIN DLKIHLRDEY NIDLEFNNED | |
| WP_008901059.1 | LIEIITDTTL NKTNKKKELK NIVGDTKFLK AISAIMIGSS QKLVDLFEDG | |
| | EFEETTVKSV DFSTTAFDDK YSEYEEALGD TISLLNILKS IYDSSILENL | |
| | LKDADKSKDG NKYISKAFVK KFNKHGKDLK TLKRIIKKYL PSEYANIFRN | |
| | KSINDNYVAY TKSNITSNKR TKASKFTKQE DFYKFIKKHL DTIKETKLNS | |
| | SENEDLKLID EMLTDIEFKT FIPKLKSSDN GVIPYQLKLM ELKKILDNQS | |
| | KYYDFLNESD EYGTVKDKVE SIMEFRIPYY VGPLNPDSKY AWIKRENTKI | |
| | TPWNFKDIVD LDSSREEFID RLIGRCTYLK EEKVLPKASL IYNEFMVLNE | |
| | LNNLKLNEFL ITEEMKKAIF EELFKTKKKV TLKAVSNLLK KEFNLTGDIL | |
| | LSGTDGDFKQ GLNSYIDFKN IIGDKVDRDD YRIKIEEIIK LIVLYEDDKT | |
| | YLKKKIKSAY KNDFTDDEIK KIAALNYKDW GRLSKRFLTG IEGVDKTTGE | |
| | KGSIIYFMRE YNLNLMELMS GHYTFTEEVE KLNPVENREL CYEMVDELYL | |
| | SPSVKRMLWQ SLRVVDEIKR IIGKDPKKIF IEMARAKEAK NSRKESRKNK | |
| | LLEFYKFGKK AFINEIGEER YNYLLNEINS EEESKFRWDN LYLYYTQLGR | |
| | CMYSLEPIDL ADLKSNNIYD QDHIYPKSKI YDDSLENRVL VKKNLNHEKG | |
| | NQYPIPEKVL NKNAYGFWKI LFDKGLIGQK KYTRLTRRTP FEERELAEFI | |
| | ERQIVETRQA TKETANLLKN ICQDSEIVYS KAENASRFRQ EFDIIKCRTV | |
| | NDLHHMHDAY LNIVVGNVYN TKFTKNPLNF IKDKDNVRSY NLENMFKYDV | |
| | VRGSYTAWIA DDSEGNVKAA TIKKVKRELE GKNYRFTRMS YIGTGGLYDQ | |
| | NLMRKGKGQI PQKENTNKSN IEKYGGYNKA SSAYFALIES DGKAGRERTL | |
| | ETIPIMVYNQ EKYGNTEAVD KYLKDNLELQ DPKILKDKIK INSLIKLDGF | |
| | LYNIKGKTGD SLSIAGSVQL IVNKEEQKLI KKMDKFLVKK KDNKDIKVTS | |
| | FDNIKEEELI KLYKTLSDKL NNGIYSNKRN NQAKNISEAL DKFKEISIEE | |
| | KIDVLNQIIL LFQSYNNGQN LKSIGLSAKT GWVFIPKKLN YKECKLINQS | |
| | ITGLFENEVD LLNL | |
| Lactobacillus | MGYRIGLDVG ITSTGYAVLK TDKNGLPYKI LTLDSVIYPR AENPQTGASL | (SEQ |
| coryniformis | AEPRRIKRGL RRRTRRTKFR KQRTQQLFIH SGLLSKPEIE QILATPQAKY | ID NO: |
| subsp. | SVYELRVAGL DRRLTNSELF RVLYFFIGHR GFKSNRKAEL NPENEADKKQ | 82) |
| torquens | MGQLLNSIEE IRKAIAEKGY RTVGELYLKD PKYNDHKRNK GYIDGYLSTP | |
| KCTC 3535 | NRQMLVDEIK QILDKQRELG NEKLTDEFYA TYLLGDENRA GIFQAQRDFD | |
| WP_010014406.1 | EGPGAGPYAG DQIKKMVGKD IFEPTEDRAA KATYTFQYFN LLQKMTSLNY | |
| | QNTTGDTWHT LNGLDRQAII DAVFAKAEKP TKTYKPTDFG ELRKLLKLPD | |
| | DARFNLVNYG SLQTQKEIET VEKKTRFVDF KAYHDLVKVL PEEMWQSRQL | |
| | LDHIGTALTL YSSDKRRRRY FAEELNLPAE LIEKLLPLNF SKFGHLSIKS | |
| | MQNIIPYLEM GQVYSEATTN TGYDFRKKQI SKDTIREEIT NPVVRRAVTK | |
| | TIKIVEQIIR RYGKPDGINI ELARELGRNF KERGDIQKRQ DKNRQTNDKI | |
| | AAELTELGIP VNGQNIIRYK LHKEQNGVDP YTGDQIPFER AFSEGYEVDH | |
| | IIPYSISWDD SYTNKVLTSA KCNREKGNRI PMVYLANNEQ RLNALTNIAD | |
| | NIIRNSRKRQ KLLKQKLSDE ELKDWKQRNI NDTRFITRVL YNYFRQAIEF | |
| | NPELEKKQRV LPLNGEVTSK IRSRWGFLKV REDGDLHHAI DATVIAAITP | |
| | KFIQQVTKYS QHQEVKNNQA LWHDAEIKDA EYAAEAQRMD ADLFNKIFNG | |
| | FPLPWPEFLD ELLARISDNP VEMMKSRSWN TYTPIEIAKL KPVFWVRLAN | |
| | HKISGPAHLD TIRSAKLFDE KGIVLSRVSI TKLKINKKGQ VATGDGIYDP | |
| | ENSNNGDKVV YSAIRQALEA HNGSGELAFP DGYLEYVDHG TKKLVRKVRV | |
| | AKKVSLPVRL KNKAAADNGS MVRIDVFNTG KKFVFVPIYI KDTVEQVLPN | |
| | KAIARGKSLW YQITESDQFC FSLYPGDMVH IESKTGIKPK YSNKENNTSV | |
| | VPIKNFYGYF DGADIATASI LVRAHDSSYT ARSIGIAGLL KFEKYQVDYF | |
| | GRYHKVHEKK RQLFVKRDE | |
| Ignavibacterium | MEFKKVLGLD IGTNSIGCAL LSLPKSIQDY GKGGRLEWLT SRVIPLDADY | (SEQ |
| album JCM | MKAFIDGKNG LPQVITPAGK RRQKRGSRRL KHRYKLRRSR LIRVFKTLNW | ID NO: |
| 16511 | LPEDFPLDNP KRIKETISTE GKFSFRISDY VPISDESYRE FYREFGYPEN | 83) |
| WP_014561873.1 | EIEQVIEEIN FRRKTKGKNK NPMIKLLPED WVVYYLRKKA LIKPTTKEEL | |
| | IRIIYLFNQR RGFKSSRKDL TETAILDYDE FAKRLAEKEK YSAENYETKF | |
| | VSITKVKEVV ELKTDGRKGK KRFKVILEDS RIEPYEIERK EKPDWEGKEY | |
| | TFLVTQKLEK GKFKQNKPDL PKEEDWALCT TALDNRMGSK HPGEFFFDEL | |
| | LKAFKEKRGY KIRQYPVNRW RYKKELEFIW TKQCQLNPEL NNLNINKEIL | |
| | RKLATVLYPS QSKFFGPKIK EFENSDVLHI ISEDIIYYQR DLKSQKSLIS | |
| | ECRYEKRKGI DGEIYGLKCI PKSSPLYQEF RIWQDIHNIK VIRKESEVNG | |
| | KKKINIDETQ LYINENIKEK LFELFNSKDS LSEKDILELI SLNIINSGIK | |
| | ISKKEEETTH RINLFANRKE LKGNETKSRY RKVFKKLGFD GEYILNHPSK | |
| | LNRLWHSDYS NDYADKEKTE KSILSSLGWK NRNGKWEKSK NYDVFNLPLE | |
| | VAKAIANLPP LKKEYGSYSA LAIRKMLVVM RDGKYWQHPD QIAKDQENTS | |
| | LMLFDKNLIQ LTNNQRKVLN KYLLTLAEVQ KRSTLIKQKL NEIEHNPYKL | |
| | ELVSDQDLEK QVLKSFLEKK NESDYLKGLK TYQAGYLIYG KHSEKDVPIV | |
| | NSPDELGEYI RKKLPNNSLR NPIVEQVIRE TIFIVRDVWK SFGIIDEIHI | |
| | ELGRELKNNS EERKKTSESQ EKNFQEKERA RKLLKELLNS SNFEHYDENG | |
| | NKIFSSFTVN PNPDSPLDIE KFRIWKNQSG LTDEELNKKL KDEKIPTEIE | |
| | VKKYILWLTQ KCRSPYTGKI IPLSKLFDSN VYEIEHIIPR SKMKNDSTNN | |
| | LVICELGVNK AKGDRLAANF ISESNGKCKF GEVEYTLLKY GDYLQYCKDT | |
| | FKYQKAKYKN LLATEPPEDF IERQINDTRY IGRKLAELLT PVVKDSKNII | |
| | FTIGSITSEL KITWGLNGVW KDILRPRFKR LESIINKKLI FQDEDDPNKY | |
| | HFDLSINPQL DKEGLKRLDH RHHALDATII AATTREHVRY LNSLNAADND | |
| | EEKREYFLSL CNHKIRDFKL PWENFTSEVK SKLLSCVVSY KESKPILSDP | |
| | FNKYLKWEYK NGKWQKVFAI QIKNDRWKAV RRSMFKEPIG TVWIKKIKEV | |
| | SLKEAIKIQA IWEEVKNDPV RKKKEKYIYD DYAQKVIAKI VQELGLSSSM | |
| | RKQDDEKLNK FINEAKVSAG VNKNLNTTNK TIYNLEGRFY EKIKVAEYVL | |
| | YKAKRMPLNK KEYIEKLSLQ KMFNDLPNFI LEKSILDNYP EILKELESDN | |
| | KYIIEPHKKN NPVNRLLLEH ILEYHNNPKE AFSTEGLEKL NKKAINKIGK | |
| | PIKYITRLDG DINEEEIFRG AVFETDKGSN VYFVMYENNQ TKDREFLKPN | |
| | PSISVLKAIE HKNKIDFFAP NRLGFSRIIL SPGDLVYVPT NDQYVLIKDN | |
| | SSNETIINWD DNEFISNRIY QVKKFTGNSC YFLKNDIASL ILSYSASNGV | |
| | GEFGSQNISE YSVDDPPIRI KDVCIKIRVD RLGNVRPL | |
| uncultured | MSSKAIDSLE QLDLFKPQEY TLGLDLGIKS IGWAILSGER IANAGVYLFE | (SEQ |
| delta | TAEELNSTGN KLISKAAERG RKRRIRRMLD RKARRGRHIR YLLEREGLPT | ID NO: |
| proteobacterium | DELEEVVVHQ SNRTLWDVRA EAVERKLTKQ ELAAVLFHLV RHRGYFPNTK | 84) |
| HF0070_07E19 | KLPPDDESDS ADEEQGKINR ATSRLREELK ASDCKTIGQF LAQNRDRQRN | |
| ADI19058.1 | REGDYSNLMA RKLVFEEALQ ILAFQRKQGH ELSKDFEKTY LDVLMGQRSG | |
| | RSPKLGNCSL IPSELRAPSS APSTEWFKFL QNLGNLQISN AYREEWSIDA | |
| | PRRAQIIDAC SQRSTSSYWQ IRRDFQIPDE YRFNLVNYER RDPDVDLQEY | |
| | LQQQERKTLA NFRNWKQLEK IIGTGHPIQT LDEAARLITL IKDDEKLSDQ | |
| | LADLLPEASD KAITQLCELD FTTAAKISLE AMYRILPHMN QGMGFFDACQ | |
| | QESLPEIGVP PAGDRVPPFD EMYNPVVNRV LSQSRKLINA VIDEYGMPAK | |
| | IRVELARDLG KGRELRERIK LDQLDKSKQN DQRAEDFRAE FQQAPRGDQS | |
| | LRYRLWKEQN CTCPYSGRMI PVNSVLSEDT QIDHILPISQ SFDNSLSNKV | |
| | LCFTEENAQK SNRTPFEYLD AADFQRLEAI SGNWPEAKRN KLLHKSFGKV | |
| | AEEWKSRALN DTRYLTSALA DHLRHHLPDS KIQTVNGRIT GYLRKQWGLE | |
| | KDRDKHTHHA VDAIVVACTT PAIVQQVTLY HQDIRRYKKL GEKRPTPWPE | |
| | TFRQDVLDVE EEIFITRQPK KVSGGIQTKD TLRKHRSKPD RQRVALTKVK | |
| | LADLERLVEK DASNRNLYEH LKQCLEESGD QPTKAFKAPF YMPSGPEAKQ | |
| | RPILSKVTLL REKPEPPKQL TELSGGRRYD SMAQGRLDIY RYKPGGKRKD | |
| | EYRVVLQRMI DLMRGEENVH VFQKGVPYDQ GPEIEQNYTF LFSLYFDDLV | |
| | EFQRSADSEV IRGYYRTFNI ANGQLKISTY LEGRQDFDFF GANRLAHFAK | |
| | VQVNLLGKVI K | |
| Ruminococcus | MGNYYLGLDV GIGSIGWAVI NIEKKRIEDF NVRIFKSGEI QEKNRNSRAS | (SEQ |
| albus 8 | QQCRRSRGLR RLYRRKSHRK LRLKNYLSII GLTTSEKIDY YYETADNNVI | ID NO: |
| WP_ | QLRNKGLSEK LTPEEIAACL IHICNNRGYK DFYEVNVEDI EDPDERNEYK | 85) |
| 002846926.1 | EEHDSIVLIS NLMNEGGYCT PAEMICNCRE FDEPNSVYRK FHNSAASKNH | |
| | YLITRHMLVK EVDLILENQS KYYGILDDKT IAKIKDIIFA QRDFEIGPGK | |
| | NERFRRFTGY LDSIGKCQFF KDQERGSRFT VIADIYAFVN VLSQYTYTNN | |
| | RGESVFDTSF ANDLINSALK NGSMDKRELK AIAKSYHIDI SDKNSDTSLT | |
| | KCFKYIKWVK PLFEKYGYDW DKLIENYTDT DNNVLNRIGI VLSQAQTPKR | |
| | RREKLKALNI GLDDGLINEL TKLKLSGTAN VSYKYMQGSI EAFCEGDLYG | |
| | KYQAKFNKEI PDIDENAKPQ KLPPFKNEDD CEFFKNPVVF RSINETRKLI | |
| | NAIIDKYGYP AAVNIETADE LNKTFEDRAI DTKRNNDNQK ENDRIVKEII | |
| | ECIKCDEVHA RHLIEKYKLW EAQEGKCLYS GETITKEDML RDKDKLFEVD | |
| | HIVPYSLILD NTINNKALVY AEENQKKGQR TPLMYMNEAQ AADYRVRVNT | |
| | MFKSKKCSKK KYQYLMLPDL NDQELLGGWR SRNLNDTRYI CKYLVNYLRK | |
| | NLRFDRSYES SDEDDLKIRD HYRVFPVKSR FTSMFRRWWL NEKTWGRYDK | |
| | AELKKLTYLD HAADAIIIAN CRPEYWVLAG EKLKLNKMYH QAGKRITPEY | |
| | EQSKKACIDN LYKLFRMDRR TAEKLLSGHG RLTPIIPNLS EEVDKRLWDK | |
| | NIYEQFWKDD KDKKSCEELY RENVASLYKG DPKFASSLSM PVISLKPDHK | |
| | YRGTITGEEA IRVKEIDGKL IKLKRKSISE ITAESINSIY TDDKILIDSL | |
| | KTIFEQADYK DVGDYLKKTN QHFFTTSSGK RVNKVTVIEK VPSRWLRKEI | |
| | DDNNFSLLND SSYYCIELYK DSKGDNNLQG IAMSDIVHDR KTKKLYLKPD | |
| | FNYPDDYYTH VMYIFPGDYL RIKSTSKKSG EQLKFEGYFI SVKNVNENSF | |
| | RFISDNKPCA KDKRVSITKK DIVIKLAVDL MGKVQGENNG KGISCGEPLS | |
| | LLKEKN | |
| Lactobacillus | MTKKEQPYNI GLDIGTSSVG WAVTNDNYDL LNIKKKNLWG VRLFEEAQTA | (SEQ |
| farciminis | KETRLNRSTR RRYRRRKNRI NWLNEIFSEE LAKTDPSFLI RLQNSWVSKK | ID NO: |
| KCTC 3681 | DPDRKRDKYN LFIDGPYTDK EYYREFPTIF HLRKELILNK DKADIRLIYL | 86) |
| WP_ | ALHNILKYRG NFTYEHQKFN ISNLNNNLSK ELIELNQQLI KYDISFPDDC | |
| 010018949.1 | DWNHISDILI GRGNATQKSS NILKDFTLDK ETKKLLKEVI NLILGNVAHL | |
| | NTIFKTSLTK DEEKLNFSGK DIESKLDDLD SILDDDQFTV LDAANRIYST | |
| | ITLNEILNGE SYFSMAKVNQ YENHAIDLCK LRDMWHTTKN EEAVEQSRQA | |
| | YDDYINKPKY GTKELYTSLK KFLKVALPTN LAKEAEEKIS KGTYLVKPRN | |
| | SENGVVPYQL NKIEMEKIID NQSQYYPFLK ENKEKLLSIL SFRIPYYVGP | |
| | LQSAEKNPFA WMERKSNGHA RPWNFDEIVD REKSSNKFIR RMTVTDSYLV | |
| | GEPVLPKNSL IYQRYEVLNE LNNIRITENL KTNPIGSRLT VETKQRIYNE | |
| | LFKKYKKVTV KKLTKWLIAQ GYYKNPILIG LSQKDEFNST LTTYLDMKKI | |
| | FGSSFMEDNK NYDQIEELIE WLTIFEDKQI LNEKLHSSKY SYTPDQIKKI | |
| | SNMRYKGWGR LSKKILMDIT TETNTPQLLQ LSNYSILDLM WATNNNFISI | |
| | MSNDKYDFKN YIENHNLNKN EDQNISDLVN DIHVSPALKR GITQSIKIVQ | |
| | EIVKFMGHAP KHIFIEVTRE TKKSEITTSR EKRIKRLQSK LLNKANDFKP | |
| | QLREYLVPNK KIQEELKKHK NDLSSERIML YFLQNGKSLY SEESLNINKL | |
| | SDYQVDHILP RTYIPDDSLE NKALVLAKEN QRKADDLLLN SNVIDRNLER | |
| | WTYMLNNNMI GLKKFKNLTR RVITDKDKLG FIHRQLVQTS QMVKGVANIL | |
| | DNMYKNQGTT CIQARANLST AFRKALSGQD DTYHFKHPEL VKNRNVNDFH | |
| | HAQDAYLASF LGTYRLRRFP TNEMLLMNGE YNKFYGQVKE LYSKKKKLPD | |
| | SRKNGFIISP LVNGTTQYDR NTGEIIWNVG FRDKILKIFN YHQCNVTRKT | |
| | EIKTGQFYDQ TIYSPKNPKY KKLIAQKKDM DPNIYGGFSG DNKSSITIVK | |
| | IDNNKIKPVA IPIRLINDLK DKKTLQNWLE ENVKHKKSIQ IIKNNVPIGQ | |
| | IIYSKKVGLL SLNSDREVAN RQQLILPPEH SALLRLLQIP DEDLDQILAF | |
| | YDKNILVEIL QELITKMKKF YPFYKGEREF LIANIENFNQ ATTSEKVNSL | |
| | EELITLLHAN STSAHLIFNN IEKKAFGRKT HGLTLNNTDF IYQSVTGLYE | |
| | TRIHIE | |
| Eubacterium | MMEVFMGRLV LGLDIGITSV GFGIIDLDES EIVDYGVRLF KEGTAAENET | (SEQ |
| dolichum DSM | RRTKRGGRRL KRRRVTRRED MLHLLKQAGI ISTSFHPLNN PYDVRVKGLN | ID NO: |
| 3991 | ERLNGEELAT ALLHLCKHRG SSVETIEDDE AKAKEAGETK KVLSMNDQLL | 87) |
| WP_ | KSGKYVCEIQ KERLRTNGHI RGHENNFKTR AYVDEAFQIL SHQDLSNELK | |
| 004800457.1 | SAIITIISRK RMYYDGPGGP LSPTPYGRYT YFGQKEPIDL IEKMRGKCSL | |
| | FPNEPRAPKL AYSAELFNLL NDLNNLSIEG EKLTSEQKAM ILKIVHEKGK | |
| | ITPKQLAKEV GVSLEQIRGF RIDTKGSPLL SELTGYKMIR EVLEKSNDEH | |
| | LEDHVFYDEI AEILTKTKDI EGRKKQISEL SSDLNEESVH QLAGLTKFTA | |
| | YHSLSFKALR LINEEMLKTE LNQMQSITLF GLKQNNELSV KGMKNIQADD | |
| | TAILSPVAKR AQRETFKVVN RLREIYGEFD SIVVEMAREK NSEEQRKAIR | |
| | ERQKFFEMRN KQVADIIGDD RKINAKLREK LVLYQEQDGK TAYSLEPIDL | |
| | KLLIDDPNAY EVDHIIPISI SLDDSITNKV LVTHRENQEK GNLTPISAFV | |
| | KGRFTKGSLA QYKAYCLKLK EKNIKTNKGY RKKVEQYLLN ENDIYKYDIQ | |
| | KEFINRNLVD TSYASRVVLN TLTTYFKQNE IPTKVFTVKG SLTNAFRRKI | |
| | NLKKDRDEDY GHHAIDALII ASMPKMRLLS TIFSRYKIED IYDESTGEVF | |
| | SSGDDSMYYD DRYFAFIASL KAIKVRKFSH KIDTKPNRSV ADETIYSTRV | |
| | IDGKEKVVKK YKDIYDPKFT ALAEDILNNA YQEKYLMALH DPQTFDQIVK | |
| | VVNYYFEEMS KSEKYFTKDK KGRIKISGMN PLSLYRDEHG MLKKYSKKGD | |
| | GPAITQMKYF DGVLGNHIDI SAHYQVRDKK VVLQQISPYR TDFYYSKENG | |
| | YKFVTIRYKD VRWSEKKKKY VIDQQDYAMK KAEKKIDDTY EFQFSMHRDE | |
| | LIGITKAEGE ALIYPDETWH NFNFFFHAGE TPEILKFTAT NNDKSNKIEV | |
| | KPIHCYCKMR LMPTISKKIV RIDKYATDWV GNLYKVKKNT LKFEFD | |
| Nitratifractor | MKKILGVDLG ITSFGYAILQ ETGKDLYRCL DNSVVMRNNP YDEKSGESSQ | (SEQ |
| salsuginis | SIRSTQKSMR RLIEKRKKRI RCVAQTMERY GILDYSETMK INDPKNNPIK | ID NO: |
| DSM 16511 | NRWQLRAVDA WKRPLSPQEL FAIFAHMAKH RGYKSIATED LIYELELELG | 88) |
| ADV46720.1 | LNDPEKESEK KADERRQVYN ALRHLEELRK KYGGETIAQT IHRAVEAGDL | |
| | RSYRNHDDYE KMIRREDIEE EIEKVLLRQA ELGALGLPEE QVSELIDELK | |
| | ACITDQEMPT IDESLFGKCT FYKDELAAPA YSYLYDLYRL YKKLADLNID | |
| | GYEVTQEDRE KVIEWVEKKI AQGKNLKKIT HKDLRKILGL APEQKIFGVE | |
| | DERIVKGKKE PRTFVPFFFL ADIAKFKELF ASIQKHPDAL QIFRELAEIL | |
| | QRSKTPQEAL DRLRALMAGK GIDTDDRELL ELFKNKRSGT RELSHRYILE | |
| | ALPLFLEGYD EKEVQRILGF DDREDYSRYP KSLRHLHLRE GNLFEKEENP | |
| | INNHAVKSLA SWALGLIADL SWRYGPFDEI ILETTRDALP EKIRKEIDKA | |
| | MREREKALDK IIGKYKKEFP SIDKRLARKI QLWERQKGLD LYSGKVINLS | |
| | QLLDGSADIE HIVPQSLGGL STDYNTIVTL KSVNAAKGNR LPGDWLAGNP | |
| | DYRERIGMLS EKGLIDWKKR KNLLAQSLDE IYTENTHSKG IRATSYLEAL | |
| | VAQVLKRYYP FPDPELRKNG IGVRMIPGKV TSKTRSLLGI KSKSRETNFH | |
| | HAEDALILST LTRGWQNRLH RMLRDNYGKS EAELKELWKK YMPHIEGLTL | |
| | ADYIDEAFRR FMSKGEESLF YRDMFDTIRS ISYWVDKKPL SASSHKETVY | |
| | SSRHEVPTLR KNILEAFDSL NVIKDRHKLT TEEFMKRYDK EIRQKLWLHR | |
| | IGNTNDESYR AVEERATQIA QILTRYQLMD AQNDKEIDEK FQQALKELIT | |
| | SPIEVTGKLL RKMRFVYDKL NAMQIDRGLV ETDKNMLGIH ISKGPNEKLI | |
| | FRRMDVNNAH ELQKERSGIL CYLNEMLFIF NKKGLIHYGC LRSYLEKGQG | |
| | SKYIALFNPR FPANPKAQPS KFTSDSKIKQ VGIGSATGII KAHLDLDGHV | |
| | RSYEVFGTLP EGSIEWFKEE SGYGRVEDDP HH | |
| Rhodospirillum | MRPIEPWILG LDIGTDSLGW AVFSCEEKGP PTAKELLGGG VRLFDSGRDA | (SEQ |
| rubrum ATCC | KDHTSRQAER GAFRRARRQT RTWPWRRDRL IALFQAAGLT PPAAETRQIA | ID NO: |
| 11170 | LALRREAVSR PLAPDALWAA LLHLAHHRGF RSNRIDKRER AAAKALAKAK | 89) |
| WP_ | PAKATAKATA PAKEADDEAG FWEGAEAALR QRMAASGAPT VGALLADDLD | |
| 011388212.1 | RGQPVRMRYN QSDRDGVVAP TRALIAEELA EIVARQSSAY PGLDWPAVTR | |
| | LVLDQRPLRS KGAGPCAFLP GEDRALRALP TVQDFIIRQT LANLRLPSTS | |
| | ADEPRPLTDE EHAKALALLS TARFVEWPAL RRALGLKRGV KFTAETERNG | |
| | AKQAARGTAG NLTEAILAPL IPGWSGWDLD RKDRVFSDLW AARQDRSALL | |
| | ALIGDPRGPT RVTEDETAEA VADAIQIVLP TGRASLSAKA ARAIAQAMAP | |
| | GIGYDEAVTL ALGLHHSHRP RQERLARLPY YAAALPDVGL DGDPVGPPPA | |
| | EDDGAAAEAY YGRIGNISVH IALNETRKIV NALLHRHGPI LRLVMVETTR | |
| | ELKAGADERK RMIAEQAERE RENAEIDVEL RKSDRWMANA RERRQRVRLA | |
| | RRQNNLCPYT STPIGHADLL GDAYDIDHVI PLARGGRDSL DNMVLCQSDA | |
| | NKTKGDKTPW EAFHDKPGWI AQRDDFLARL DPQTAKALAW RFADDAGERV | |
| | ARKSAEDEDQ GFLPRQLTDT GYIARVALRY LSLVTNEPNA VVATNGRLTG | |
| | LLRLAWDITP GPAPRDLLPT PRDALRDDTA ARRFLDGLTP PPLAKAVEGA | |
| | VQARLAALGR SRVADAGLAD ALGLTLASLG GGGKNRADHR HHFIDAAMIA | |
| | VTTRGLINQI NQASGAGRIL DLRKWPRTNF EPPYPTFRAE VMKQWDHIHP | |
| | SIRPAHRDGG SLHAATVFGV RNRPDARVLV QRKPVEKLFL DANAKPLPAD | |
| | KIAEIIDGFA SPRMAKRFKA LLARYQAAHP EVPPALAALA VARDPAFGPR | |
| | GMTANTVIAG RSDGDGEDAG LITPFRANPK AAVRTMGNAV YEVWEIQVKG | |
| | RPRWTHRVLT RFDRTQPAPP PPPENARLVM RLRRGDLVYW PLESGDRLFL | |
| | VKKMAVDGRL ALWPARLATG KATALYAQLS CPNINLNGDQ GYCVQSAEGI | |
| | RKEKIRTTSC TALGRLRLSK KAT | |
| Finegoldia | MKSEKKYYIG LDVGTNSVGW AVTDEFYNIL RAKGKDLWGV RLFEKADTAA | (SEQ |
| magna ATCC | NTRIFRSGRR RNDRKGMRLQ ILREIFEDEI KKVDKDFYDR LDESKFWAED | ID NO: |
| 29328 | KKVSGKYSLF NDKNFSDKQY FEKFPTIFHL RKYLMEEHGK VDIRYYFLAI | 90) |
| WP_012290141.1 | NQMMKRRGHF LIDGQISHVT DDKPLKEQLI LLINDLLKIE LEEELMDSIF | |
| | EILADVNEKR TDKKNNLKEL IKGQDFNKQE GNILNSIFES IVTGKAKIKN | |
| | IISDEDILEK IKEDNKEDFV LTGDSYEENL QYFEEVLQEN ITLFNTLKST | |
| | YDFLILQSIL KGKSTLSDAQ VERYDEHKKD LEILKKVIKK YDEDGKLFKQ | |
| | VFKEDNGNGY VSYIGYYLNK NKKITAKKKI SNIEFTKYVK GILEKQCDCE | |
| | DEDVKYLLGK IEQENFLLKQ ISSINSVIPH QIHLFELDKI LENLAKNYPS | |
| | FNNKKEEFTK IEKIRKTFTF RIPYYVGPLN DYHKNNGGNA WIFRNKGEKI | |
| | RPWNFEKIVD LHKSEEEFIK RMLNQCTYLP EETVLPKSSI LYSEYMVLNE | |
| | LNNLRINGKP LDTDVKLKLI EELFKKKTKV TLKSIRDYMV RNNFADKEDF | |
| | DNSEKNLEIA SNMKSYIDFN NILEDKFDVE MVEDLIEKIT IHTGNKKLLK | |
| | KYIEETYPDL SSSQIQKIIN LKYKDWGRLS RKLLDGIKGT KKETEKTDTV | |
| | INFLRNSSDN LMQIIGSQNY SFNEYIDKLR KKYIPQEISY EVVENLYVSP | |
| | SVKKMIWQVI RVTEEITKVM GYDPDKIFIE MAKSEEEKKT TISRKNKLLD | |
| | LYKAIKKDER DSQYEKLLTG LNKLDDSDLR SRKLYLYYTQ MGRDMYTGEK | |
| | IDLDKLFDST HYDKDHIIPQ SMKKDDSIIN NLVLVNKNAN QTTKGNIYPV | |
| | PSSIRNNPKI YNYWKYLMEK EFISKEKYNR LIRNTPLTNE ELGGFINRQL | |
| | VETRQSTKAI KELFEKFYQK SKIIPVKASL ASDLRKDMNT LKSREVNDLH | |
| | HAHDAFLNIV AGDVWNREFT SNPINYVKEN REGDKVKYSL SKDFTRPRKS | |
| | KGKVIWTPEK GRKLIVDTLN KPSVLISNES HVKKGELFNA TIAGKKDYKK | |
| | GKIYLPLKKD DRLQDVSKYG GYKAINGAFF FLVEHTKSKK RIRSIELFPL | |
| | HLLSKFYEDK NTVLDYAINV LQLQDPKIII DKINYRTEII IDNFSYLIST | |
| | KSNDGSITVK PNEQMYWRVD EISNLKKIEN KYKKDAILTE EDRKIMESYI | |
| | DKIYQQFKAG KYKNRRTTDT IIEKYEIIDL DTLDNKQLYQ LLVAFISLSY | |
| | KTSNNAVDFT VIGLGTECGK PRITNLPDNT YLVYKSITGI YEKRIRIK | |
| Eubacterium | MNYTEKEKLF MKYILALDIG IASVGWAILD KESETVIEAG SNIFPEASAA | (SEQ |
| rectale ATCC | DNQLRRDMRG AKRNNRRLKT RINDFIKLWE NNNLSIPQFK STEIVGLKVR | ID NO: |
| 33656 | AITEEITLDE LYLILYSYLK HRGISYLEDA LDDTVSGSSA YANGLKLNAK | 91) |
| WP_ | ELETHYPCEI QQERLNTIGK YRGQSQIINE NGEVLDLSNV FTIGAYRKEI | |
| 012742555.1 | QRVFEIQKKY HPELTDEFCD GYMLIFNRKR KYYEGPGNEK SRTDYGRFTT | |
| | KLDANGNYIT EDNIFEKLIG KCSVYPDELR AAAASYTAQE YNVLNDLNNL | |
| | TINGRKLEEN EKHEIVERIK SSNTINMRKI ISDCMGENID DFAGARIDKS | |
| | GKEIFHKFEV YNKMRKALLE IGIDISNYSR EELDEIGYIM TINTDKEAMM | |
| | EAFQKSWIDL SDDVKQCLIN MRKTNGALFN KWQSFSLKIM NELIPEMYAQ | |
| | PKEQMTLLTE MGVTKGTQEE FAGLKYIPVD VVSEDIFNPV VRRSVRISFK | |
| | ILNAVLKKYK ALDTIVIEMP RDRNSEEQKK RINDSQKLNE KEMEYIEKKL | |
| | AVTYGIKLSP SDFSSQKQLS LKLKLWNEQD GICLYSGKTI DPNDIINNPQ | |
| | LFEIDHIIPR SISFDDARSN KVLVYRSENQ KKGNQTPYYY LTHSHSEWSF | |
| | EQYKATVMNL SKKKEYAISR KKIQNLLYSE DITKMDVLKG FINRNINDTS | |
| | YASRLVLNTI QNFFMANEAD TKVKVIKGSY THQMRCNLKL DKNRDESYSH | |
| | HAVDAMLIGY SELGYEAYHK LQGEFIDFET GEILRKDMWD ENMSDEVYAD | |
| | YLYGKKWANI RNEVVKAEKN VKYWHYVMRK SNRGLCNQTI RGTREYDGKQ | |
| | YKINKLDIRT KEGIKVFAKL AFSKKDSDRE RLLVYLNDRR TFDDLCKIYE | |
| | DYSDAANPFV QYEKETGDII RKYSKKHNGP RIDKLKYKDG EVGACIDISH | |
| | KYGFEKGSKK VILESLVPYR MDVYYKEENH SYYLVGVKQS DIKFEKGRNV | |
| | IDEEAYARIL VNEKMIQPGQ SRADLENLGF KFKLSFYKND IIEYEKDGKI | |
| | YTERLVSRTM PKQRNYIETK PIDKAKFEKQ NLVGLGKTKF IKKYRYDILG | |
| | NKYSCSEEKF TSFC | |
| Corynebacterium | MKYHVGIDVG TFSVGLAAIE VDDAGMPIKT LSLVSHIHDS GLDPDKIKSA | (SEQ |
| diphtheriae | VTRLASSGIA RRTRRLYRRK RRRLQQLDKF IQRQGWPVIE LEDYSDPLYP | ID NO: |
| C7 (beta) | WKVRAELAAS YIADEKERGE KLSVALRHIA RHRGWRNPYA KVSSLYLPDE | 92) |
| AEX66236.1 | PSDAFKAIRE EIKRASGQPV PETATVGQMV TLCELGTLKL RGEGGVLSAR | |
| WP_ | LQQSDHAREI QEICRMQEIG QELYRKIIDV VFAAESPKGS ASSRVGKDPL | |
| 014318431.1 | QPGKNRALKA SDAFQRYRIA ALIGNLRVRV DGEKRILSVE EKNLVFDHLV | |
| | NLAPKKEPEW VTIAEILGID RGQLIGTATM TDDGERAGAR PPTHDTNRSI | |
| | VNSRIAPLVD WWKTASALEQ HAMVKALSNA EVDDFDSPEG AKVQAFFADL | |
| | DDDVHAKLDS LHLPVGRAAY SEDTLVRLTR RMLADGVDLY TARLQEFGIE | |
| | PSWTPPAPRI GEPVGNPAVD RVLKTVSRWL ESATKTWGAP ERVIIEHVRE | |
| | GFVTEKRARE MDGDMRRRAA RNAKLFQEMQ EKLNVQGKPS RADLWRYQSV | |
| | QRQNCQCAYC GSPITFSNSE MDHIVPRAGQ GSTNTRENLV AVCHRCNQSK | |
| | GNTPFAIWAK NTSIEGVSVK EAVERTRHWV TDTGMRSTDF KKFTKAVVER | |
| | FQRATMDEEI DARSMESVAW MANELRSRVA QHFASHGTTV RVYRGSLTAE | |
| | ARRASGISGK LEFLDGVGKS RLDRRHHAID AAVIAFTSDY VAETLAVRSN | |
| | LKQSQAHRQE APQWREFTGK DAEHRAAWRV WCQKMEKLSA LLTEDLRDDR | |
| | VVVMSNVRLR LGNGSAHEET IGKLSKVKLG SQLSVSDIDK ASSEALWCAL | |
| | TREPDFDPKD GLPANPERHI RVNGTHVYAG DNIGLFPVSA GSIALRGGYA | |
| | ELGSSFHHAR VYKITSGKKP AFAMLRVYTI DLLPYRNQDL FSVELKPQTM | |
| | SMRQAEKKLR DALATGNAEY LGWLVVDDEL VVDTSKIATD QVKAVEAELG | |
| | TIRRWRVDGF FGDTRLRLRP LQMSKEGIKK ESAPELSKII DRPGWLPAVN | |
| | KLFSEGNVTV VRRDSLGRVR LESTAHLPVT WKVQ | |
| Roseburia | MNAEHGKEGL LIMEENFQYR IGLDIGITSV GWAVLQNNSQ DEPVRITDLG | (SEQ |
| inulinivorans | VRIFDVAENP KNGDALAAPR RDARTTRRRL RRRRHRLERI KFLLQENGLI | ID NO: |
| DSM 16841 | EMDSFMERYY KGNLPDVYQL RYEGLDRKLK DEELAQVLIH IAKHRGFRST | 93) |
| WP_ | RKAETKEKEG GAVLKATTEN QKIMQEKGYR TVGEMLYLDE AFHTECLWNE | |
| 007889305.1 | KGYVLTPRNR PDDYKHTILR SMLVEEVHAI FAAQRAHGNQ KATEGLEEAY | |
| | VEIMTSQRSF DMGPGLQPDG KPSPYAMEGF GDRVGKCTFE KDEYRAPKAT | |
| | YTAELFVALQ KINHTKLIDE FGTGRFFSEE ERKTIIGLLL SSKELKYGTI | |
| | RKKLNIDPSL KFNSLNYSAK KEGETEEERV LDTEKAKFAS MFWTYEYSKC | |
| | LKDRTEEMPV GEKADLFDRI GEILTAYKND DSRSSRLKEL GLSGEEIDGL | |
| | LDLSPAKYQR VSLKAMRKMQ PYLEDGLIYD KACEAAGYDF RALNDGNKKH | |
| | LLKGEEINAI VNDITNPVVK RSVSQTIKVI NAIIQKYGSP QAVNIELARE | |
| | MSKNFQDRTN LEKEMKKRQQ ENERAKQQII ELGKQNPTGQ DILKYRLWND | |
| | QGGYCLYSGK KIPLEELFDG GYDIDHILPY SITFDDSYRN KVLVTAQENR | |
| | QKGNRTPYEY FGADEKRWED YEASVRLLVR DYKKQQKLLK KNFTEEERKE | |
| | FKERNLNDTK YITRVVYNMI RQNLELEPFN HPEKKKQVWA VNGAVTSYLR | |
| | KRWGLMQKDR STDRHHAMDA VVIACCTDGM IHKISRYMQG RELAYSRNFK | |
| | FPDEETGEIL NRDNFTREQW DEKFGVKVPL PWNSFRDELD IRLLNEDPKN | |
| | FLLTHADVQR ELDYPGWMYG EEESPIEEGR YINYIRPLFV SRMPNHKVTG | |
| | SAHDATIRSA RDYETRGWVI TKVPLTDLKL NKDNEIEGYY DKDSDRLLYQ | |
| | ALVRQLLLHG NDGKKAFAED FHKPKADGTE GPWVRKVKIE KKQTSGVMVR | |
| | GGTGIAANGE MVRIDVFREN GKYYFVPVYT ADVVRKVLPN RAATHTKPYS | |
| | EWRVMDDANF VFSLYSRDLI HVKSKKDIKT NLVNGGLLLQ KEIFAYYTGA | |
| | DIATASIAGF ANDSNFKFRG LGIQSLEIFE KCQVDILGNI SVVRHENRQE | |
| | FH | |
| Alicycliphilus | MRSLRYRLAL DLGSTSLGWA LFRLDACNRP TAVIKAGVRI FSDGRNPKDG | (SEQ |
| denitrificans | SSLAVTRRAA RAMRRRRDRL LKRKTRMQAK LVEHGFFPAD AGKRKALEQL | ID NO: |
| K601 | NPYALRAKGL QEALLPGEFA RALFHINQRR GFKSNRKTDK KDNDSGVLKK | 94) |
| WP_ | AIGQLRQQMA EQGSRTVGEY LWTRLQQGQG VRARYREKPY TTEEGKKRID | |
| 013517127.1 | KSYDLYIDRA MIEQEFDALW AAQAAFNPTL FHEAARADLK DTLLHQRPLR | |
| | PVKPGRCTLL PEEERAPLAL PSTQRFRIHQ EVNHLRLLDE NLREVALTLA | |
| | QRDAVVTALE TKAKLSFEQI RKLLKLSGSV QFNLEDAKRT ELKGNATSAA | |
| | LARKELFGAA WSGFDEALQD EIVWQLVTEE GEGALIAWLQ THTGVDEARA | |
| | QAIVDVSLPE GYGNLSRKAL ARIVPALRAA VITYDKAVQA AGFDHHSQLG | |
| | FEYDASEVED LVHPETGEIR SVFKQLPYYG KALQRHVAFG SGKPEDPDEK | |
| | RYGKIANPTV HIGLNQVRMV VNALIRRYGR PTEVVIELAR DLKQSREQKV | |
| | EAQRRQADNQ RRNARIRRSI AEVLGIGEER VRGSDIQKWI CWEELSFDAA | |
| | DRRCPYSGVQ ISAAMLLSDE VEVEHILPFS KTLDDSLNNR TVAMRQANRI | |
| | KRNRTPWDAR AEFEAQGWSY EDILQRAERM PLRKRYRFAP DGYERWLGDD | |
| | KDFLARALND TRYLSRVAAE YLRLVCPGTR VIPGQLTALL RGKFGLNDVL | |
| | GLDGEKNRND HRHHAVDACV IGVTDQGLMQ RFATASAQAR GDGLTRLVDG | |
| | MPMPWPTYRD HVERAVRHIW VSHRPDHGFE GAMMEETSYG IRKDGSIKQR | |
| | RKADGSAGRE ISNLIRIHEA TQPLRHGVSA DGQPLAYKGY VGGSNYCIEI | |
| | TVNDKGKWEG EVISTFRAYG VVRAGGMGRL RNPHEGQNGR KLIMRLVIGD | |
| | SVRLEVDGAE RTMRIVKISG SNGQIFMAPI HEANVDARNT DKQDAFTYTS | |
| | KYAGSLQKAK TRRVTISPIGEVRDPGFKG | |
| Sphaerochaeta | MSKKVSRRYE EQAQEICQRL GSRPYSIGLD LGVGSIGVAV AAYDPIKKQP | (SEQ |
| globosa str. | SDLVFVSSRI FIPSTGAAER RQKRGQRNSL RHRANRLKFL WKLLAERNLM | ID NO: |
| Buddy | LSYSEQDVPD PARLRFEDAV VRANPYELRL KGLNEQLTLS ELGYALYHIA | 95) |
| WP_ | NHRGSSSVRT FLDEEKSSDD KKLEEQQAMT EQLAKEKGIS TFIEVLTAFN | |
| 013607849.1 | TNGLIGYRNS ESVKSKGVPV PTRDIISNEI DVLLQTQKQF YQEILSDEYC | |
| | DRIVSAILFE NEKIVPEAGC CPYFPDEKKL PRCHFLNEER RLWEAINNAR | |
| | IKMPMQEGAA KRYQSASFSD EQRHILFHIA RSGTDITPKL VQKEFPALKT | |
| | SIIVLQGKEK AIQKIAGFRF RRLEEKSFWK RLSEEQKDDF FSAWTNTPDD | |
| | KRLSKYLMKH LLLTENEVVD ALKTVSLIGD YGPIGKTATQ LLMKHLEDGL | |
| | TYTEALERGM ETGEFQELSV WEQQSLLPYY GQILTGSTQA LMGKYWHSAF | |
| | KEKRDSEGFF KPNTNSDEEK YGRIANPVVH QTLNELRKLM NELITILGAK | |
| | PQEITVELAR ELKVGAEKRE DIIKQQTKQE KEAVLAYSKY CEPNNLDKRY | |
| | IERFRLLEDQ AFVCPYCLEH ISVADIAAGR ADVDHIFPRD DTADNSYGNK | |
| | VVAHRQCNDI KGKRTPYAAF SNTSAWGPIM HYLDETPGMW RKRRKFETNE | |
| | EEYAKYLQSK GFVSRFESDN SYIAKAAKEY LRCLFNPNNV TAVGSLKGME | |
| | TSILRKAWNL QGIDDLLGSR HWSKDADTSP TMRKNRDDNR HHGLDAIVAL | |
| | YCSRSLVQMI NTMSEQGKRA VEIEAMIPIP GYASEPNLSF EAQRELFRKK | |
| | ILEFMDLHAF VSMKTDNDAN GALLKDTVYS ILGADTQGED LVFVVKKKIK | |
| | DIGVKIGDYE EVASAIRGRI TDKQPKWYPM EMKDKIEQLQ SKNEAALQKY | |
| | KESLVQAAAV LEESNRKLIE SGKKPIQLSE KTISKKALEL VGGYYYLISN | |
| | NKRTKTFWVK EPSNEVKGFA FDTGSNLCLD FYHDAQGKLC GEIIRKIQAM | |
| | NPSYKPAYMK QGYSLYVRLY QGDVCELRAS DLTEAESNLA KTTHVRLPNA | |
| | KPGRTFVIII TFTEMGSGYQ IYFSNLAKSK KGQDTSFTLT TIKNYDVRKV | |
| | QLSSAGLVRY VSPLLVDKIE KDEVALCGE | |
| Fusobacterium | MKKQKFSDYY LGFDIGTNSV GWCVTDLDYN VLRFNKKDMW GSRLFDEAKT | (SEQ |
| nucleatum | AAERRVQRNS RRRLKRRKWR LNLLEEIFSD EIMKIDSNFF RRLKESSLWL | ID NO: |
| subsp. | EDKNSKEKFT LFNDDNYKDY DFYKQYPTIF HLRDELIKNP EKKDIRLIYL | |
| vincentii ATCC | ALHSIFKSRG HFLFEGQNLK EIKNFETLYN NLISFLEDNG INKSIDKDNI | 96) |
| 49256 | EKLEKIICDS GKGLKDKEKE FKGIFNSDKQ LVAIFKLSVG SSVSLNDLFD | |
| WP_ | TDEYKKEEVE KEKISFREQI YEDDKPIYYS ILGEKIELLD IAKSFYDFMV | |
| 005888649.1 | LNNILSDSNY ISEAKVKLYE EHKKDLKNLK YIIRKYNKEN YDKLFKDKNE | |
| | NNYPAYIGLN KEKDKKEVVE KSRLKIDDLI KVIKGYLPKP ERIEEKDKTI | |
| | FNEILNKIEL KTILPKQRIS DNGTLPYQIH EVELEKILEN QSKYYDFLNY | |
| | EENGVSTKDK LLKTFKFRIP YYVGPLNSYH KDKGGNSWIV RKEEGKILPW | |
| | NFEQKVDIEK SAEEFIKRMT NKCTYLNGED VIPKDSFLYS EYIILNELNK | |
| | VQVNDEFLNE ENKRKIIDEL FKENKKVSEK KFKEYLLVNQ IANRTVELKG | |
| | IKDSFNSNYV SYIKFKDIFG EKLNLDIYKE ISEKSILWKC LYGDDKKIFE | |
| | KKIKNEYGDI LNKDEIKKIN SFKFNTWGRL SEKLLTGIEF INLETGECYS | |
| | SVMEALRRTN YNLMELLSSK FTLQESIDNE NKEMNEVSYR DLIEESYVSP | |
| | SLKRAILQTL KIYEEIKKIT GRVPKKVFIE MARGGDESMK NKKIPARQEQ | |
| | LKKLYDSCGN DIANFSIDIK EMKNSLSSYD NNSLRQKKLY LYYLQFGKCM | |
| | YTGREIDLDR LLQNNDTYDI DHIYPRSKVI KDDSFDNLVL VLKNENAEKS | |
| | NEYPVKKEIQ EKMKSFWRFL KEKNFISDEK YKRLTGKDDF ELRGFMARQL | |
| | VNVRQTTKEV GKILQQIEPE IKIVYSKAEI ASSFREMFDF IKVRELNDTH | |
| | HAKDAYLNIV AGNVYNTKFT EKPYRYLQEI KENYDVKKIY NYDIKNAWDK | |
| | ENSLEIVKKN MEKNTVNITR FIKEEKGELF NLNPIKKGET SNEIISIKPK | |
| | LYDGKDNKLN EKYGYYTSLK AAYFIYVEHE KKNKKVKTFE RITRIDSTLI | |
| | KNEKNLIKYL VSQKKLLNPK IIKKIYKEQT LIIDSYPYTF TGVDSNKKVE | |
| | LKNKKQLYLE KKYEQILKNA LKFVEDNQGE TEENYKFIYL KKRNNNEKNE | |
| | TIDAVKERYN IEFNEMYDKF LEKLSSKDYK NYINNKLYTN FLNSKEKFKK | |
| | LKLWEKSLIL REFLKIFNKN TYGKYEIKDS QTKEKLFSFP EDTGRIRLGQ | |
| | SSLGNNKELL EESVTGLFVK KIKL | |
| Pasteurella | MQTTNLSYIL GLDLGIASVG WAVVEINENE DPIGLIDVGV RIFERAEVPK | (SEQ |
| multocida | TGESLALSRR LARSTRRLIR RRAHRLLLAK RFLKREGILS TIDLEKGLPN | ID NO: |
| subsp. | QAWELRVAGL ERRLSAIEWG AVLLHLIKHR GYLSKRKNES QTNNKELGAL | 97) |
| multocida str. | LSGVAQNHQL LQSDDYRTPA ELALKKFAKE EGHIRNQRGA YTHTFNRLDL | |
| Pm70 | LAELNLLFAQ QHQFGNPHCK EHIQQYMTEL LMWQKPALSG EAILKMLGKC | |
| WP_010907033.1 | THEKNEFKAA KHTYSAERFV WLTKLNNLRI LEDGAERALN EEERQLLINH | |
| | PYEKSKLTYA QVRKLLGLSE QAIFKHLRYS KENAESATFM ELKAWHAIRK | |
| | ALENQGLKDT WQDLAKKPDL LDEIGTAFSL YKTDEDIQQY LTNKVPNSVI | |
| | NALLVSLNFD KFIELSLKSL RKILPLMEQG KRYDQACREI YGHHYGEANQ | |
| | KTSQLLPAIP AQEIRNPVVL RTLSQARKVI NAIIRQYGSP ARVHIETGRE | |
| | LGKSFKERRE IQKQQEDNRT KRESAVQKFK ELFSDFSSEP KSKDILKFRL | |
| | YEQQHGKCLY SGKEINIHRL NEKGYVEIDH ALPFSRTWDD SFNNKVLVLA | |
| | SENQNKGNQT PYEWLQGKIN SERWKNFVAL VLGSQCSAAK KQRLLTQVID | |
| | DNKFIDRNLN DTRYIARFLS NYIQENLLLV GKNKKNVFTP NGQITALLRS | |
| | RWGLIKAREN NNRHHALDAI VVACATPSMQ QKITRFIRFK EVHPYKIENR | |
| | YEMVDQESGE IISPHFPEPW AYFRQEVNIR VFDNHPDTVL KEMLPDRPQA | |
| | NHQFVQPLFV SRAPTRKMSG QGHMETIKSA KRLAEGISVL RIPLTQLKPN | |
| | LLENMVNKER EPALYAGLKA RLAEFNQDPA KAFATPFYKQ GGQQVKAIRV | |
| | EQVQKSGVLV RENNGVADNA SIVRTDVFIK NNKFFLVPIY TWQVAKGILP | |
| | NKAIVAHKNE DEWEEMDEGA KFKFSLFPND LVELKTKKEY FFGYYIGLDR | |
| | ATGNISLKEH DGEISKGKDG VYRVGVKLAL SFEKYQVDEL GKNRQICRPQ | |
| | QRQPVR | |
| Alcanivorax | MRYRVGLDLG TASVGAAVFS MDEQGNPMEL IWHYERLFSE PLVPDMGQLK | (SEQ |
| pacificus | PKKAARRLAR QQRRQIDRRA SRLRRIAIVS RRLGIAPGRN DSGVHGNDVP | ID NO: |
| W11-5 | TLRAMAVNER IELGQLRAVL LRMGKKRGYG GTFKAVRKVG EAGEVASGAS | 98) |
| WP_00873826 | RLEEEMVALA SVQNKDSVTV GEYLAARVEH GLPSKLKVAA NNEYYAPEYA | |
| 9.1 | LFRQYLGLPA IKGRPDCLPN MYALRHQIEH EFERIWATQS QFHDVMKDHG | |
| | VKEEIRNAIF FQRPLKSPAD KVGRCSLQTN LPRAPRAQIA AQNFRIEKQM | |
| | ADLRWGMGRR AEMLNDHQKA VIRELLNQQK ELSFRKIYKE LERAGCPGPE | |
| | GKGLNMDRAA LGGRDDLSGN TTLAAWRKLG LEDRWQELDE VTQIQVINFL | |
| | ADLGSPEQLD TDDWSCRFMG KNGRPRNFSD EFVAFMNELR MTDGFDRLSK | |
| | MGFEGGRSSY SIKALKALTE WMIAPHWRET PETHRVDEEA AIRECYPESL | |
| | ATPAQGGRQS KLEPPPLTGN EVVDVALRQV RHTINMMIDD LGSVPAQIVV | |
| | EMAREMKGGV TRRNDIEKQN KRFASERKKA AQSIEENGKT PTPARILRYQ | |
| | LWIEQGHQCP YCESNISLEQ ALSGAYTNFE HILPRTLTQI GRKRSELVLA | |
| | HRECNDEKGN RTPYQAFGHD DRRWRIVEQR ANALPKKSSR KTRLLLLKDF | |
| | EGEALTDESI DEFADRQLHE SSWLAKVTTQ WLSSLGSDVY VSRGSLTAEL | |
| | RRRWGLDTVI PQVRFESGMP VVDEEGAEIT PEEFEKFRLQ WEGHRVTREM | |
| | RTDRRPDKRI DHRHHLVDAI VTALTSRSLY QQYAKAWKVA DEKQRHGRVD | |
| | VKVELPMPIL TIRDIALEAV RSVRISHKPD RYPDGRFFEA TAYGIAQRLD | |
| | ERSGEKVDWL VSRKSLTDLA PEKKSIDVDK VRANISRIVG EAIRLHISNI | |
| | FEKRVSKGMT PQQALREPIE FQGNILRKVR CFYSKADDCV RIEHSSRRGH | |
| | HYKMLLNDGF AYMEVPCKEG ILYGVPNLVR PSEAVGIKRA PESGDFIRFY | |
| | KGDTVKNIKT GRVYTIKQIL GDGGGKLILT PVTETKPADL LSAKWGRLKV | |
| | GGRNIHLLRL CAE | |
| Mycoplasma | MYFYKNKENK LNKKVVLGLD LGIASVGWCL TDISQKEDNK FPIILHGVRL | (SEQ |
| mobile 163K | FETVDDSDDK LLNETRRKKR GQRRRNRRLF TRKRDFIKYL IDNNIIELEF | ID NO: |
| AAT27519.1 | DKNPKILVRN FIEKYINPFS KNLELKYKSV TNLPIGFHNL RKAAINEKYK | 99) |
| | LDKSELIVLL YFYLSLRGAF FDNPEDTKSK EMNKNEIEIF DKNESIKNAE | |
| | FPIDKIIEFY KISGKIRSTI NLKFGHQDYL KEIKQVFEKQ NIDFMNYEKF | |
| | AMEEKSFFSR IRNYSEGPGN EKSFSKYGLY ANENGNPELI INEKGQKIYT | |
| | KIFKTLWESK IGKCSYDKKL YRAPKNSFSA KVFDITNKLT DWKHKNEYIS | |
| | ERLKRKILLS RFLNKDSKSA VEKILKEENI KFENLSEIAY NKDDNKINLP | |
| | IINAYHSLTT IFKKHLINFE NYLISNENDL SKLMSFYKQQ SEKLFVPNEK | |
| | GSYEINQNNN VLHIFDAISN ILNKFSTIQD RIRILEGYFE FSNLKKDVKS | |
| | SEIYSEIAKL REFSGTSSLS FGAYYKFIPN LISEGSKNYS TISYEEKALQ | |
| | NQKNNFSHSN LFEKTWVEDL IASPTVKRSL RQTMNLLKEI FKYSEKNNLE | |
| | IEKIVVEVTR SSNNKHERKK IEGINKYRKE KYEELKKVYD LPNENTTLLK | |
| | KLWLLRQQQG YDAYSLRKIE ANDVINKPWN YDIDHIVPRS ISFDDSFSNL | |
| | VIVNKLDNAK KSNDLSAKQF IEKIYGIEKL KEAKENWGNW YLRNANGKAF | |
| | NDKGKFIKLY TIDNLDEFDN SDFINRNLSD TSYITNALVN HLTFSNSKYK | |
| | YSWVSVNGKQ TSNLRNQIAF VGIKNNKETE REWKRPEGFK SINSNDFLIR | |
| | EEGKNDVKDD VLIKDRSFNG HHAEDAYFIT IISQYFRSFK RIERLNVNYR | |
| | KETRELDDLE KNNIKFKEKA SFDNFLLINA LDELNEKLNQ MRFSRMVITK | |
| | KNTQLFNETL YSGKYDKGKN TIKKVEKLNL LDNRTDKIKK IEEFFDEDKL | |
| | KENELTKLHI FNHDKNLYET LKIIWNEVKI EIKNKNLNEK NYFKYFVNKK | |
| | LQEGKISFNE WVPILDNDFK IIRKIRYIKF SSEEKETDEI IFSQSNFLKI | |
| | DQRQNFSFHN TLYWVQIWVY KNQKDQYCFI SIDARNSKFE KDEIKINYEK | |
| | LKTQKEKLQI INEEPILKIN KGDLFENEEK ELFYIVGRDE KPQKLEIKYI | |
| | LGKKIKDQKQ IQKPVKKYFP NWKKVNLTYM GEIFKK | |
| gamma | MTKNYISPIA IDLGAKFTGV ALYQYLEGAD CTQEVAKGLL VDDRGNVTWS | (SEQ |
| proteobacterium | QEGRRGKRHQ VRGYKRRKMA KRLLWLILDS EYGIKREEVT EPLLKFINGL | ID NO: |
| HTCC5015 | LNRRGYTYIS EEVDEESMNV SPLPFSEMMP DYFNSSAPLL EQLAKLLSDK | 100) |
| WP_ | NKLVRFRAEG KIPSNKNEFK KLLDTALDGK YKDEKKELSE AWGNILIASE | |
| 008284239.1 | NVLKSTVDGH KSRSEYLANI KEDIKSNEEL EKQISSKEID GFYNLVGHLS | |
| | NFQLRLLRKY FNDPNMSGVS YWDEKRLEKY FYQWVQGWHT KGGTDEAEKK | |
| | NIILKTKGAP LLKTLKSLSA DLTIPPYEDQ NNRRPPKCQS VLLSDEKLTM | |
| | HYPKWKEWVG QLVKQNDNAY LNENVTLANA LHRIVERSRS IDPYQLRLLI | |
| | SITDAEKRND LAGYKRLKLS LGSEVDEFLL LVKNIVDETK EAREGLWFET | |
| | ENKLFFKCGK TPPRKEKLKS TLLSAVLGKN LSDDEQSSFI EEFWKSGTPK | |
| | IERRNVRGWC RLASQVQKTY GVYLKEYGLQ QLHKLEAGKK LDDKPLALLY | |
| | KNSGLIASKI GEALNIEPDE VSRFASPHSL AQIFNIIEGD VAGFNKTCRA | |
| | CTYENIWRMQ EEKVESLLTN QLLSEIHGER KVPLKSAMCT RLSADSTRPF | |
| | DGQMASIIEH IARKIAQHKI AQINDVPKEF SIDIPIIIES NQFSFTAELE | |
| | EIKRGRGSAK AKKAKELGEK SKAGWVSKTE RIKTSSEGIC PYTGAPLGGS | |
| | GEIDHIIPRS LTGRTKKTVF NSEANLIYCS SKGNHDKGNR VYVIEQLNDK | |
| | YLKKQFSTSD VNLIKKKIKT TIQRFTEGGE KLRSFSELSR EDQKAFRHAL | |
| | FVPELKSEVT SLLAVKNITR VNGTQAWLAK KIASLLAEHL DKQGRDYTLS | |
| | AHQIDPWSVS KQRKMLASAE PIWAKKDPQP AASHVVDAVC TFLEALEQPH | |
| | TASRLKTISS TSFEKTGWRS ALIPDLIKVD ALDRRPKYRR YNIGSTSLFK | |
| | DGIYAERFLP ILIDENGLMA GYDIDNSLKA KGADVVFESL SPFLLFKGEE | |
| | VGAQSLSDWQ ERIDGRYLYM SIDKVKAFDY LQEKVGEKDI AAELLNSIHF | |
| | TQRKTELRAK FSDDSGKKMK TLDAIRKSLK LTVTVNEIGK RKEKCGFSGT | |
| | IGIPAKSAWE NLLDEPLLET YWGTKMPPQE IWEKVYRKHF PRNIPNQAHR | |
| | KVRKDFSLPV VDSVSGGFRV KRKTPNGYNY QLLAIDGYSA VGFKKEGDNV | |
| | DFKSPALVPQ IAESKSVTPI SSELVHLDKN EIVYFDEWRK IDISDSDLKQ | |
| | FVSSLELAPG SQNRFYIRFT VDEDQFERHF KSALRVNGIQ DLDTVNKTFD | |
| | WNREIPSLLI PPRSNLFLLE TGQKITFEYI ANGANAEVKK AYSLRRA | |
| Planococcus | MKNYTIGLDI GVASVGWVCI DENYKILNYN NRHAFGVHEF ESAESAAGRR | (SEQ |
| antarcticus | LKRGMRRRYN RRKKRLQLLQ SLFDSYITDS GFFSKTDSQH FWKNNNEFEN | ID NO: |
| DSM 14505 | RSLTEVLSSL RISSRKYPTI YHLRSDLIES NKKMDLRLVY LALHNLVKYR | 101) |
| ANU10858.1 | GHFLQEGNWS EAASAEGMDD QLLELVTRYA ELENLSPLDL SESQWKAAET | |
| | LLLNRNLTKT DQSKELTAMF GKEYEPFCKL VAGLGVSLHQ LFPSSEQALA | |
| | YKETKTKVQL SNENVEEVME LLLEEESALL EAVQPFYQQV VLYELLKGET | |
| | YVAKAKVSAF KQYQKDMASL KNLLDKTFGE KVYRSYFISD KNSQREYQKS | |
| | HKVEVLCKLD QFNKEAKFAE TFYKDLKKLL EDKSKTSIGT TEKDEMLRII | |
| | KAIDSNQFLQ KQKGIQNAAI PHQNSLYEAE KILRNQQAHY PFITTEWIEK | |
| | VKQILAFRIP YYIGPLVKDT TQSPFSWVER KGDAPITPWN FDEQIDKAAS | |
| | AEAFISRMRK TCTYLKGQEV LPKSSLTYER FEVLNELNGI QLRTTGAESD | |
| | FRHRLSYEMK CWIIDNVFKQ YKTVSTKRLL QELKKSPYAD ELYDEHTGEI | |
| | KEVFGTQKEN AFATSLSGYI SMKSILGAVV DDNPAMTEEL IYWIAVFEDR | |
| | EILHLKIQEK YPSITDVQRQ KLALVKLPGW GRFSRLLIDG LPLDEQGQSV | |
| | LDHMEQYSSV FMEVLKNKGF GLEKKIQKMN QHQVDGTKKI RYEDIEELAG | |
| | SPALKRGIWR SVKIVEELVS IFGEPANIVL EVAREDGEKK RTKSRKDQWE | |
| | ELTKTTLKND PDLKSFIGEI KSQGDQRFNE QRFWLYVTQQ GKCLYTGKAL | |
| | DIQNLSMYEV DHILPQNFVK DDSLDNLALV MPEANQRKNQ VGQNKMPLEI | |
| | IEANQQYAMR TLWERLHELK LISSGKLGRL KKPSFDEVDK DKFIARQLVE | |
| | TRQIIKHVRD LLDERFSKSD IHLVKAGIVS KFRRFSEIPK IRDYNNKHHA | |
| | MDALFAAALI QSILGKYGKN FLAFDLSKKD RQKQWRSVKG SNKEFFLFKN | |
| | FGNLRLQSPV TGEEVSGVEY MKHVYFELPW QTTKMTQTGD GMFYKESIFS | |
| | PKVKQAKYVS PKTEKFVHDE VKNHSICLVE FTFMKKEKEV QETKFIDLKV | |
| | IEHHQFLKEP ESQLAKFLAE KETNSPIIHA RIIRTIPKYQ KIWIEHFPYY | |
| | FISTRELHNA RQFEISYELM EKVKQLSERS SVEELKIVFG LLIDQMNDNY | |
| | PIYTKSSIQD RVQKFVDTQL YDFKSFEIGF EELKKAVAAN AQRSDTFGSR | |
| | ISKKPKPEEV AIGYESITGL KYRKPRSVVG TKR | |
| Prevotella sp. | MTQKVLGLDL GTNSIGSAVR NLDLSDDLQW QLEFFSSDIF RSSVNKESNG | (SEQ |
| C561 | REYSLAAQRS AHRRSRGLNE VRRRRLWATL NLLIKHGFCP MSSESLMRWC | ID NO: |
| WP_00901330 | TYDKRKGLFR EYPIDDKDFN AWILLDFNGD GRPDYSSPYQ LRRELVTRQF | 102) |
| 3.1 | DFEQPIERYK LGRALYHIAQ HRGFKSSKGE TLSQQETNSK PSSTDEIPDV | |
| | AGAMKASEEK LSKGLSTYMK EHNLLTVGAA FAQLEDEGVR VRNNNDYRAI | |
| | RSQFQHEIET IFKFQQGLSV ESELYERLIS EKKNVGTIFY KRPLRSQRGN | |
| | VGKCTLERSK PRCAIGHPLF EKFRAWTLIN NIKVRMSVDT LDEQLPMKLR | |
| | LDLYNECFLA FVRTEFKFED IRKYLEKRLG IHFSYNDKTI NYKDSTSVAG | |
| | CPITARFRKM LGEEWESFRV EGQKERQAHS KNNISFHRVS YSIEDIWHFC | |
| | YDAEEPEAVL AFAQETLRLE RKKAEELVRI WSAMPQGYAM LSQKAIRNIN | |
| | KILMLGLKYS DAVILAKVPE LVDVSDEELL SIAKDYYLVE AQVNYDKRIN | |
| | SIVNGLIAKY KSVSEEYRFA DHNYEYLLDE SDEKDIIRQI ENSLGARRWS | |
| | LMDANEQTDI LQKVRDRYQD FFRSHERKFV ESPKLGESFE NYLTKKFPMV | |
| | EREQWKKLYH PSQITIYRPV SVGKDRSVLR LGNPDIGAIK NPTVLRVLNT | |
| | LRRRVNQLLD DGVISPDETR VVVETARELN DANRKWALDT YNRIRHDENE | |
| | KIKKILEEFY PKRDGISTDD IDKARYVIDQ REVDYFTGSK TYNKDIKKYK | |
| | FWLEQGGQCM YTGRTINLSN LFDPNAFDIE HTIPESLSFD SSDMNLTLCD | |
| | AHYNRFIKKN HIPTDMPNYD KAITIDGKEY PAITSQLQRW VERVERLNRN | |
| | VEYWKGQARR AQNKDRKDQC MREMHLWKME LEYWKKKLER FTVTEVTDGF | |
| | KNSQLVDTRV ITRHAVLYLK SIFPHVDVQR GDVTAKFRKI LGIQSVDEKK | |
| | DRSLHSHHAI DATTLTIIPV SAKRDRMLEL FAKIEEINKM LSFSGSEDRT | |
| | GLIQELEGLK NKLQMEVKVC RIGHNVSEIG TFINDNIIVN HHIKNQALTP | |
| | VRRRLRKKGY IVGGVDNPRW QTGDALRGEI HKASYYGAIT QFAKDDEGKV | |
| | LMKEGRPQVN PTIKFVIRRE LKYKKSAADS GFASWDDLGK AIVDKELFAL | |
| | MKGQFPAETS FKDACEQGIY MIKKGKNGMP DIKLHHIRHV RCEAPQSGLK | |
| | IKEQTYKSEK EYKRYFYAAV GDLYAMCCYT NGKIREFRIY SLYDVSCHRK | |
| | SDIEDIPEFI TDKKGNRLML DYKLRTGDMI LLYKDNPAEL YDLDNVNLSR | |
| | RLYKINRFES QSNLVLMTHH LSTSKERGRS LGKTVDYQNL PESIRSSVKS | |
| | LNFLIMGENR DFVIKNGKII FNHR | |
| Alicyclobacillus | MAYRLGLDIG ITSVGWAVVA LEKDESGLKP VRIQDLGVRI FDKAEDSKTG | (SEQ |
| hesperidum | ASLALPRREA RSARRRTRRR RHRLWRVKRL LEQHGILSME QIEALYAQRT | ID NO: |
| URH17-3-68 | SSPDVYALRV AGLDRCLIAE EIARVLIHIA HRRGFQSNRK SEIKDSDAGK | 103) |
| WP_006446566.1 | LLKAVQENEN LMQSKGYRTV AEMLVSEATK TDAEGKLVHG KKHGYVSNVR | |
| | NKAGEYRHTV SRQAIVDEVR KIFAAQRALG NDVMSEELED SYLKILCSQR | |
| | NFDDGPGGDS PYGHGSVSPD GVRQSIYERM VGSCTFETGE KRAPRSSYSF | |
| | ERFQLLTKVV NLRIYRQQED GGRYPCELTQ TERARVIDCA YEQTKITYGK | |
| | LRKLLDMKDT ESFAGLTYGL NRSRNKTEDT VFVEMKFYHE VRKALQRAGV | |
| | FIQDLSIETL DQIGWILSVW KSDDNRRKKL STLGLSDNVI EELLPLNGSK | |
| | FGHLSLKAIR KILPFLEDGY SYDVACELAG YQFQGKTEYV KQRLLPPLGE | |
| | GEVTNPVVRR ALSQAIKVVN AVIRKHGSPE SIHIELAREL SKNLDERRKI | |
| | EKAQKENQKN NEQIKDEIRE ILGSAHVTGR DIVKYKLFKQ QQEFCMYSGE | |
| | KLDVTRLFEP GYAEVDHIIP YGISFDDSYD NKVLVKTEQN RQKGNRTPLE | |
| | YLRDKPEQKA KFIALVESIP LSQKKKNHLL MDKRAIDLEQ EGFRERNLSD | |
| | TRYITRALMN HIQAWLLFDE TASTRSKRVV CVNGAVTAYM RARWGLTKDR | |
| | DAGDKHHAAD AVWVACIGDS LIQRVTKYDK FKRNALADRN RYVQQVSKSE | |
| | GITQYVDKET GEVFTWESFD ERKFLPNEPL EPWPFFRDEL LARLSDDPSK | |
| | NIRAIGLLTY SETEQIDPIF VSRMPTRKVT GAAHKETIRS PRIVKVDDNK | |
| | GTEIQVVVSK VALTELKLTK DGEIKDYFRP EDDPRLYNTL RERLVQFGGD | |
| | AKAAFKEPVY KISKDGSVRT PVRKVKIQEK LTLGVPVHGG RGIAENGGMV | |
| | RIDVFAKGGK YYFVPIYVAD VLKRELPNRL ATAHKPYSEW RVVDDSYQFK | |
| | FSLYPNDAVM IKPSREVDIT YKDRKEPVGC RIMYFVSANI ASASISLRTH | |
| | DNSGELEGLG IQGLEVFEKY WVGPLGDTHP VYKERRMPFR VERKMN | |
| Lactobacillus | MTKLNQPYGI GLDIGSNSIG FAVVDANSHL LRLKGETAIG ARLFREGQSA | (SEQ |
| rhamnosus GG | ADRRGSRTTR RRLSRTRWRL SFLRDFFAPH ITKIDPDFFL RQKYSEISPK | ID NO: |
| WP_014569977.1 | DKDRFKYEKR LFNDRTDAEF YEDYPSMYHL RLHLMTHTHK ADPREIFLAI | 104) |
| | HHILKSRGHF LTPGAAKDFN TDKVDLEDIF PALTEAYAQV YPDLELTFDL | |
| | AKADDFKAKL LDEQATPSDT QKALVNLLLS SDGEKEIVKK RKQVLTEFAK | |
| | AITGLKTKFN LALGTEVDEA DASNWQFSMG QLDDKWSNIE TSMTDQGTEI | |
| | FEQIQELYRA RLLNGIVPAG MSLSQAKVAD YGQHKEDLEL FKTYLKKLND | |
| | HELAKTIRGL YDRYINGDDA KPFLREDFVK ALTKEVTAHP NEVSEQLLNR | |
| | MGQANFMLKQ RTKANGAIPI QLQQRELDQI IANQSKYYDW LAAPNPVEAH | |
| | RWKMPYQLDE LLNFHIPYYV GPLITPKQQA ESGENVFAWM VRKDPSGNIT | |
| | PYNFDEKVDR EASANTFIQR MKTTDTYLIG EDVLPKQSLL YQKYEVLNEL | |
| | NNVRINNECL GTDQKQRLIR EVFERHSSVT IKQVADNLVA HGDFARRPEI | |
| | RGLADEKRFL SSLSTYHQLK EILHEAIDDP TKLLDIENII TWSTVFEDHT | |
| | IFETKLAEIE WLDPKKINEL SGIRYRGWGQ FSRKLLDGLK LGNGHTVIQE | |
| | LMLSNHNLMQ ILADETLKET MTELNQDKLK TDDIEDVIND AYTSPSNKKA | |
| | LRQVLRVVED IKHAANGQDP SWLFIETADG TGTAGKRTQS RQKQIQTVYA | |
| | NAAQELIDSA VRGELEDKIA DKASFTDRLV LYFMQGGRDI YTGAPLNIDQ | |
| | LSHYDIDHIL PQSLIKDDSL DNRVLVNATI NREKNNVFAS TLFAGKMKAT | |
| | WRKWHEAGLI SGRKLRNLML RPDEIDKFAK GFVARQLVET RQIIKLTEQI | |
| | AAAQYPNTKI IAVKAGLSHQ LREELDFPKN RDVNHYHHAF DAFLAARIGT | |
| | YLLKRYPKLA PFFTYGEFAK VDVKKFREFN FIGALTHAKK NIIAKDTGEI | |
| | VWDKERDIRE LDRIYNFKRM LITHEVYFET ADLFKQTIYA AKDSKERGGS | |
| | KQLIPKKQGY PTQVYGGYTQ ESGSYNALVR VAEADTTAYQ VIKISAQNAS | |
| | KIASANLKSR EKGKQLLNEI VVKQLAKRRK NWKPSANSFK IVIPRFGMGT | |
| | LFQNAKYGLF MVNSDTYYRN YQELWLSREN QKLLKKLFSI KYEKTQMNHD | |
| | ALQVYKAIID QVEKFFKLYD INQFRAKLSD AIERFEKLPI NTDGNKIGKT | |
| | ETLRQILIGL QANGTRSNVK NLGIKTDLGL LQVGSGIKLD KDTQIVYQSP | |
| | SGLFKRRIPL ADL | |
| Enterococcus | MYSIGLDLGI SSVGWSVIDE RTGNVIDLGV RLFSAKNSEK NLERRTNRGG | (SEQ |
| faecalis | RRLIRRKTNR LKDAKKILAA VGFYEDKSLK NSCPYQLRVK GLTEPLSRGE | ID NO: |
| TX0012 | IYKVTLHILK KRGISYLDEV DTEAAKESQD YKEQVRKNAQ LLTKYTPGQI | 105) |
| WP_ | QLQRLKENNR VKTGINAQGN YQLNVFKVSA YANELATILK TQQAFYPNEL | |
| 002408901.1 | TDDWIALFVQ PGIAEEAGLI YRKRPYYHGP GNEANNSPYG RWSDFQKTGE | |
| EFT93846.1 | PATNIFDKLI GKDFQGELRA SGLSLSAQQY NLLNDLTNLK IDGEVPLSSE | |
| | QKEYILTELM TKEFTRFGVN DVVKLLGVKK ERLSGWRLDK KGKPEIHTLK | |
| | GYRNWRKIFA EAGIDLATLP TETIDCLAKV LTLNTEREGI ENTLAFELPE | |
| | LSESVKLLVL DRYKELSQSI STQSWHRFSL KTLHLLIPEL MNATSEQNTL | |
| | LEQFQLKSDV RKRYSEYKKL PTKDVLAEIY NPTVNKTVSQ AFKVIDALLV | |
| | KYGKEQIRYI TIEMPRDDNE EDEKKRIKEL HAKNSQRKND SQSYFMQKSG | |
| | WSQEKFQTTI QKNRRFLAKL LYYYEQDGIC AYTGLPISPE LLVSDSTEID | |
| | HIIPISISLD DSINNKVLVL SKANQVKGQQ TPYDAWMDGS FKKINGKFSN | |
| | WDDYQKWVES RHFSHKKENN LLETRNIFDS EQVEKFLARN LNDTRYASRL | |
| | VLNTLQSFFT NQETKVRVVN GSFTHTLRKK WGADLDKTRE THHHHAVDAT | |
| | LCAVTSFVKV SRYHYAVKEE TGEKVMREID FETGEIVNEM SYWEFKKSKK | |
| | YERKTYQVKW PNFREQLKPV NLHPRIKFSH QVDRKANRKL SDATIYSVRE | |
| | KTEVKTLKSG KQKITTDEYT IGKIKDIYTL DGWEAFKKKQ DKLLMKDLDE | |
| | KTYERLLSIA ETTPDFQEVE EKNGKVKRVK RSPFAVYCEE NDIPAIQKYA | |
| | KKNNGPLIRS LKYYDGKLNK HINITKDSQG RPVEKTKNGR KVTLQSLKPY | |
| | RYDIYQDLET KAYYTVQLYY SDLRFVEGKY GITEKEYMKK VAEQTKGQWV | |
| | RFCFSLQKND GLEIEWKDSQ RYDVRFYNFQ SANSINFKGL EQEMMPAENQ | |
| | FKQKPYNNGA INLNIAKYGK EGKKLRKFNT DILGKKHYLF YEKEPKNIIK | |
| Candidatus | MRRLGLDLGT NSIGWCLLDL GDDGEPVSIF RTGARIFSDG RDPKSLGSLK | (SEQ |
| Puniceispirillum | ATRREARLTR RRRDRFIQRQ KNLINALVKY GLMPADEIQR QALAYKDPYP | ID NO: |
| marinum | IRKKALDEAI DPYEMGRAIF HINQRRGFKS NRKSADNEAG VVKQSIADLE | 106) |
| IMCC1322 | MKLGEAGART IGEFLADRQA TNDTVRARRL SGTNALYEFY PDRYMLEQEF | |
| WP_ | DTLWAKQAAF NPSLYIEAAR ERLKEIVFFQ RKLKPQEVGR CIFLSDEDRI | |
| 013047413.1 | SKALPSFQRF RIYQELSNLA WIDHDGVAHR ITASLALRDH LFDELEHKKK | |
| | LTFKAMRAIL RKQGVVDYPV GFNLESDNRD HLIGNLTSCI MRDAKKMIGS | |
| | AWDRLDEEEQ DSFILMLQDD QKGDDEVRSI LTQQYGLSDD VAEDCLDVRL | |
| | PDGHGSLSKK AIDRILPVLR DQGLIYYDAV KEAGLGEANL YDPYAALSDK | |
| | LDYYGKALAG HVMGASGKFE DSDEKRYGTI SNPTVHIALN QVRAVVNELI | |
| | RLHGKPDEVV IEIGRDLPMG ADGKRELERF QKEGRAKNER ARDELKKLGH | |
| | IDSRESRQKF QLWEQLAKEP VDRCCPFTGK MMSISDLFSD KVEIEHLLPF | |
| | SLTLDDSMAN KTVCFRQANR DKGNRAPFDA FGNSPAGYDW QEILGRSQNL | |
| | PYAKRWRFLP DAMKRFEADG GFLERQLNDT RYISRYTTEY ISTIIPKNKI | |
| | WVVTGRLTSL LRGFWGLNSI LRGHNTDDGT PAKKSRDDHR HHAIDAIVVG | |
| | MTSRGLLQKV SKAARRSEDL DLTRLFEGRI DPWDGFRDEV KKHIDAIIVS | |
| | HRPRKKSQGA LHNDTAYGIV EHAENGASTV VHRVPITSLG KQSDIEKVRD | |
| | PLIKSALLNE TAGLSGKSFE NAVQKWCADN SIKSLRIVET VSIIPITDKE | |
| | GVAYKGYKGD GNAYMDIYQD PTSSKWKGEI VSRFDANQKG FIPSWQSQFP | |
| | TARLIMRLRI NDLLKLQDGE IEEIYRVQRL SGSKILMAPH TEANVDARDR | |
| | DKNDTFKLTS KSPGKLQSAS ARKVHISPTG LIREG | |
| Oenococcus | MARDYSVGLD IGTSSVGWAA IDNKYHLIRA KSKNLIGVRL FDSAVTAEKR | (SEQ |
| kitaharae DSM | RGYRTTRRRL SRRHWRLRLL NDIFAGPLTD FGDENFLARL KYSWVHPQDQ | ID NO: |
| 17330 | SNQAHFAAGL LFDSKEQDKD FYRKYPTIYH LRLALMNDDQ KHDLREVYLA | 107) |
| EHN59352.1 | IHHLVKYRGH FLIEGDVKAD SAFDVHTFAD AIQRYAESNN SDENLLGKID | |
| | EKKLSAALTD KHGSKSQRAE TAETAFDILD LQSKKQIQAI LKSVVGNQAN | |
| | LMAIFGLDSS AISKDEQKNY KFSFDDADID EKIADSEALL SDTEFEFLCD | |
| | LKAAFDGLTL KMLLGDDKTV SAAMVRRFNE HQKDWEYIKS HIRNAKNAGN | |
| | GLYEKSKKFD GINAAYLALQ SDNEDDRKKA KKIFQDEISS ADIPDDVKAD | |
| | FLKKIDDDQF LPIQRTKNNG TIPHQLHRNE LEQIIEKQGI YYPFLKDTYQ | |
| | ENSHELNKIT ALINFRVPYY VGPLVEEEQK IADDGKNIPD PTNHWMVRKS | |
| | NDTITPWNLS QWVDLDKSGR RFIERLTGTD TYLIGEPTLP KNSLLYQKFD | |
| | VLQELNNIRV SGRRLDIRAK QDAFEHLFKV QKTVSATNLK DFLVQAGYIS | |
| | EDTQIEGLAD VNGKNFNNAL TTYNYLVSVL GREFVENPSN EELLEEITEL | |
| | QTVFEDKKVL RRQLDQLDGL SDHNREKLSR KHYTGWGRIS KKLLTTKIVQ | |
| | NADKIDNQTF DVPRMNQSII DTLYNTKMNL MEIINNAEDD FGVRAWIDKQ | |
| | NTTDGDEQDV YSLIDELAGP KEIKRGIVQS FRILDDITKA VGYAPKRVYL | |
| | EFARKTQESH LTNSRKNQLS TLLKNAGLSE LVTQVSQYDA AALQNDRLYL | |
| | YFLQQGKDMY SGEKLNLDNL SNYDIDHIIP QAYTKDNSLD NRVLVSNITN | |
| | RRKSDSSNYL PALIDKMRPF WSVLSKQGLL SKHKFANLTR TRDFDDMEKE | |
| | RFIARSLVET RQIIKNVASL IDSHFGGETK AVAIRSSLTA DMRRYVDIPK | |
| | NRDINDYHHA FDALLFSTVG QYTENSGLMK KGQLSDSAGN QYNRYIKEWI | |
| | HAARLNAQSQ RVNPFGFVVG SMRNAAPGKL NPETGEITPE ENADWSIADL | |
| | DYLHKVMNFR KITVTRRLKD QKGQLYDESR YPSVLHDAKS KASINFDKHK | |
| | PVDLYGGFSS AKPAYAALIK FKNKFRLVNV LRQWTYSDKN SEDYILEQIR | |
| | GKYPKAEMVL SHIPYGQLVK KDGALVTISS ATELHNFEQL WLPLADYKLI | |
| | NTLLKTKEDN LVDILHNRLD LPEMTIESAF YKAFDSILSF AFNRYALHQN | |
| | ALVKLQAHRD DFNALNYEDK QQTLERILDA LHASPASSDL KKINLSSGFG | |
| | RLFSPSHFTL ADTDEFIFQS VTGLFSTQKT VAQLYQETK | |
| Helicobacter | MIRTLGIDIG IASIGWAVIE GEYTDKGLEN KEIVASGVRV FTKAENPKNK | (SEQ |
| mustelae | ESLALPRTLA RSARRRNARK KGRIQQVKHY LSKALGLDLE CFVQGEKLAT | ID NO: |
| 12198 | LFQTSKDFLS PWELRERALY RVLDKEELAR VILHIAKRRG YDDITYGVED | 108) |
| WP_ | NDSGKIKKAI AENSKRIKEE QCKTIGEMMY KLYFQKSLNV RNKKESYNRC | |
| 013022389.1 | VGRSELREEL KTIFQIQQEL KSPWVNEELI YKLLGNPDAQ SKQEREGLIF | |
| | YQRPLKGFGD KIGKCSHIKK GENSPYRACK HAPSAEEFVA LTKSINFLKN | |
| | LTNRHGLCFS QEDMCVYLGK ILQEAQKNEK GLTYSKLKLL LDLPSDFEFL | |
| | GLDYSGKNPE KAVFLSLPST FKLNKITQDR KTQDKIANIL GANKDWEAIL | |
| | KELESLQLSK EQIQTIKDAK LNFSKHINLS LEALYHLLPL MREGKRYDEG | |
| | VEILQERGIF SKPQPKNRQL LPPLSELAKE ESYFDIPNPV LRRALSEFRK | |
| | WVNALLEKYG GFHYFHIELT RDVCKAKSAR MQLEKINKKN KSENDAASQL | |
| | LEVLGLPNTY NNRLKCKLWK QQEEYCLYSG EKITIDHLKD QRALQIDHAF | |
| | PLSRSLDDSQ SNKVLCLTSS NQEKSNKTPY EWLGSDEKKW DMYVGRVYSS | |
| | NFSPSKKRKL TQKNFKERNE EDFLARNLVD TGYIGRVTKE YIKHSLSFLP | |
| | LPDGKKEHIR IISGSMTSTM RSFWGVQEKN RDHHLHHAQD AIIIACIEPS | |
| | MIQKYTTYLK DKETHRLKSH QKAQILREGD HKLSLRWPMS NFKDKIQESI | |
| | QNIIPSHHVS HKVTGELHQE TVRTKEFYYQ AFGGEEGVKK ALKFGKIREI | |
| | NQGIVDNGAM VRVDIFKSKD KGKFYAVPIY TYDFAIGKLP NKAIVQGKKN | |
| | GIIKDWLEMD ENYEFCFSLF KNDCIKIQTK EMQEAVLAIY KSTNSAKATI | |
| | ELEHLSKYAL KNEDEEKMFT DTDKEKNKTM TRESCGIQGL KVFQKVKLSV | |
| | LGEVLEHKPR NRQNIALKTT PKHV | |
| Bradyrhizobium | MKRTSLRAYR LGVDLGANSL GWFVVWLDDH GQPEGLGPGG VRIFPDGRNP | (SEQ |
| sp. BTAi1 | QSKQSNAAGR RLARSARRRR DRYLQRRGKL MGLLVKHGLM PADEPARKRL | ID NO: |
| WP_ | ECLDPYGLRA KALDEVLPLH HVGRALFHLN QRRGLFANRA IEQGDKDASA | 109) |
| 012044026.1 | IKAAAGRLQT SMQACGARTL GEFLNRRHQL RATVRARSPV GGDVQARYEF | |
| | YPTRAMVDAE FEAIWAAQAP HHPTMTAEAH DTIREAIFSQ RAMKRPSIGK | |
| | CSLDPATSQD DVDGFRCAWS HPLAQRFRIW QDVRNLAVVE TGPTSSRLGK | |
| | EDQDKVARAL LQTDQLSFDE IRGLLGLPSD ARFNLESDRR DHLKGDATGA | |
| | ILSARRHFGP AWHDRSLDRQ IDIVALLESA LDEAAIIASL GTTHSLDEAA | |
| | AQRALSALLP DGYCRLGLRA IKRVLPLMEA GRTYAEAASA AGYDHALLPG | |
| | GKLSPTGYLP YYGQWLQNDV VGSDDERDTN ERRWGRLPNP TVHIGIGQLR | |
| | RVVNELIRWH GPPAEITVEL TRDLKLSPRR LAELEREQAE NQRKNDKRTS | |
| | LLRKLGLPAS THNLLKLRLW DEQGDVASEC PYTGEAIGLE RLVSDDVDID | |
| | HLIPFSISWD DSAANKVVCM RYANREKGNR TPFEAFGHRQ GRPYDWADIA | |
| | ERAARLPRGK RWRFGPGARA QFEELGDFQA RLLNETSWLA RVAKQYLAAV | |
| | THPHRIHVLP GRLTALLRAT WELNDLLPGS DDRAAKSRKD HRHHAIDALV | |
| | AALTDQALLR RMANAHDDTR RKIEVLLPWP TFRIDLETRL KAMLVSHKPD | |
| | HGLQARLHED TAYGTVEHPE TEDGANLVYR KTFVDISEKE IDRIRDRRLR | |
| | DLVRAHVAGE RQQGKTLKAA VLSFAQRRDI AGHPNGIRHV RLTKSIKPDY | |
| | LVPIRDKAGR IYKSYNAGEN AFVDILQAES GRWIARATTV FQANQANESH | |
| | DAPAAQPIMR VFKGDMLRID HAGAEKFVKI VRLSPSNNLL YLVEHHQAGV | |
| | FQTRHDDPED SFRWLFASFD KLREWNAELV RIDTLGQPWR RKRGLETGSE | |
| | DATRIGWTRP KKWP | |
| Acidaminococcus | MGKMYYLGLD IGTNSVGYAV TDPSYHLLKF KGEPMWGAHV FAAGNQSAER | (SEQ |
| sp. D21 | RSFRTSRRRL DRRQQRVKLV QEIFAPVISP IDPRFFIRLH ESALWRDDVA | ID NO: |
| WP_00901621 | ETDKHIFFND PTYTDKEYYS DYPTIHHLIV DLMESSEKHD PRLVYLAVAW | 110) |
| 9.1 | LVAHRGHFLN EVDKDNIGDV LSFDAFYPEF LAFLSDNGVS PWVCESKALQ | |
| | ATLLSRNSVN DKYKALKSLI FGSQKPEDNF DANISEDGLI QLLAGKKVKV | |
| | NKLFPQESND ASFTLNDKED AIEEILGTLT PDECEWIAHI RRLFDWAIMK | |
| | HALKDGRTIS ESKVKLYEQH HHDLTQLKYF VKTYLAKEYD DIFRNVDSET | |
| | TKNYVAYSYH VKEVKGTLPK NKATQEEFCK YVLGKVKNIE CSEADKVDFD | |
| | EMIQRLTDNS FMPKQVSGEN RVIPYQLYYY ELKTILNKAA SYLPFLTQCG | |
| | KDAISNQDKL LSIMTFRIPY FVGPLRKDNS EHAWLERKAG KIYPWNFNDK | |
| | VDLDKSEEAF IRRMTNTCTY YPGEDVLPLD SLIYEKFMIL NEINNIRIDG | |
| | YPISVDVKQQ VFGLFEKKRR VTVKDIQNLL LSLGALDKHG KLTGIDTTIH | |
| | SNYNTYHHFK SLMERGVLTR DDVERIVERM TYSDDTKRVR LWLNNNYGTL | |
| | TADDVKHISR LRKHDFGRLS KMFLTGLKGV HKETGERASI LDFMWNTNDN | |
| | LMQLLSECYT FSDEITKLQE AYYAKAQLSL NDFLDSMYIS NAVKRPIYRT | |
| | LAVVNDIRKA CGTAPKRIFI EMARDGESKK KRSVTRREQI KNLYRSIRKD | |
| | FQQEVDFLEK ILENKSDGQL QSDALYLYFA QLGRDMYTGD PIKLEHIKDQ | |
| | SFYNIDHIYP QSMVKDDSLD NKVLVQSEIN GEKSSRYPLD AAIRNKMKPL | |
| | WDAYYNHGLI SLKKYQRLTR STPFTDDEKW DFINRQLVET RQSTKALAIL | |
| | LKRKFPDTEI VYSKAGLSSD FRHEFGLVKS RNINDLHHAK DAFLAIVTGN | |
| | VYHERFNRRW FMVNQPYSVK TKTLFTHSIK NGNFVAWNGE EDLGRIVKML | |
| | KQNKNTIHFT RFSFDRKEGL FDIQPLKAST GLVPRKAGLD VVKYGGYDKS | |
| | TAAYYLLVRF TLEDKKTQHK LMMIPVEGLY KARIDHDKEF LTDYAQTTIS | |
| | EILQKDKQKV INIMFPMGTR HIKLNSMISI DGFYLSIGGK SSKGKSVLCH | |
| | AMVPLIVPHK IECYIKAMES FARKFKENNK LRIVEKFDKI TVEDNLNLYE | |
| | LFLQKLQHNP YNKFFSTQFD VLTNGRSTFT KLSPEEQVQT LLNILSIFKT | |
| | CRSSGCDLKS INGSAQAARI MISADLTGLS KKYSDIRLVE QSASGLFVSK | |
| | SQNLLEYL | |
| Methylosinus | MRVLGLDAGI ASLGWALIEI EESNRGELSQ GTIIGAGTWM FDAPEEKTQA | (SEQ |
| trichosporium | GAKLKSEQRR TFRGQRRVVR RRRQRMNEVR RILHSHGLLP SSDRDALKQP | ID NO: |
| OB3b | GLDPWRIRAE ALDRLLGPVE LAVALGHIAR HRGFKSNSKG AKTNDPADDT | |
| WP_00361103 | SKMKRAVNET REKLARFGSA AKMLVEDESF VLRQTPTKNG ASEIVRRFRN | |
| 4.1 | REGDYSRSLL RDDLAAEMRA LFTAQARFQS AIATADLQTA FTKAAFFQRP | 111) |
| | LQDSEKLVGP CPFEVDEKRA PKRGYSFELF RFLSRLNHVT LRDGKQERTL | |
| | TRDELALAAA DFGAAAKVSF TALRKKLKLP ETTVFVGVKA DEESKLDVVA | |
| | RSGKAAEGTA RLRSVIVDAL GELAWGALLC SPEKLDKIAE VISFRSDIGR | |
| | ISEGLAQAGC NAPLVDALTA AASDGRFDPF TGAGHISSKA ARNILSGLRQ | |
| | GMTYDKACCA ADYDHTASRE RGAFDVGGHG REALKRILQE ERISRELVGS | |
| | PTARKALIES IKQVKAIVER YGVPDRIHVE LARDVGKSIE EREEITRGIE | |
| | KRNRQKDKLR GLFEKEVGRP PQDGARGKEE LLRFELWSEQ MGRCLYTDDY | |
| | ISPSQLVATD DAVQVDHILP WSRFADDSYA NKTLCMAKAN QDKKGRTPYE | |
| | WFKAEKTDTE WDAFIVRVEA LADMKGFKKR NYKLRNAEEA AAKFRNRNLN | |
| | DTRWACRLLA EALKQLYPKG EKDKDGKERR RVFSRPGALT DRLRRAWGLQ | |
| | WMKKSTKGDR IPDDRHHALD AIVIAATTES LLQRATREVQ EIEDKGLHYD | |
| | LVKNVTPPWP GFREQAVEAV EKVFVARAER RRARGKAHDA TIRHIAVREG | |
| | EQRVYERRKV AELKLADLDR VKDAERNARL IEKLRNWIEA GSPKDDPPLS | |
| | PKGDPIFKVR LVTKSKVNIA LDTGNPKRPG TVDRGEMARV DVFRKASKKG | |
| | KYEYYLVPIY PHDIATMKTP PIRAVQAYKP EDEWPEMDSS YEFCWSLVPM | |
| | TYLQVISSKG EIFEGYYRGM NRSVGAIQLS AHSNSSDVVQ GIGARTLTEF | |
| | KKFNVDRFGR KHEVERELRT WRGETWRGKA YI | |
| Actinomyces | MDNKNYRIGI DVGLNSIGFC AVEVDQHDTP LGFLNLSVYR HDAGIDPNGK | (SEQ |
| coleocanis | KTNTTRLAMS GVARRTRRLF RKRKRRLAAL DRFIEAQGWT LPDHADYKDP | ID NO: |
| DSM 15436 | YTPWLVRAEL AQTPIRDEND LHEKLAIAVR HIARHRGWRS PWVPVRSLHV | 112) |
| WP_ | EQPPSDQYLA LKERVEAKTL LQMPEGATPA EMVVALDLSV DVNLRPKNRE | |
| 006546479.1 | KTDTRPENKK PGFLGGKLMQ SDNANELRKI AKIQGLDDAL LRELIELVFA | |
| | ADSPKGASGE LVGYDVLPGQ HGKRRAEKAH PAFQRYRIAS IVSNLRIRHL | |
| | GSGADERLDV ETQKRVFEYL LNAKPTADIT WSDVAEEIGV ERNLLMGTAT | |
| | QTADGERASA KPPVDVTNVA FATCKIKPLK EWWLNADYEA RCVMVSALSH | |
| | AEKLTEGTAA EVEVAEFLQN LSDEDNEKLD SFSLPIGRAA YSVDSLERLT | |
| | KRMIENGEDL FEARVNEFGV SEDWRPPAEP IGARVGNPAV DRVLKAVNRY | |
| | LMAAEAEWGA PLSVNIEHVR EGFISKRQAV EIDRENQKRY QRNQAVRSQI | |
| | ADHINATSGV RGSDVTRYLA IQRQNGECLY CGTAITFVNS EMDHIVPRAG | |
| | LGSTNTRDNL VATCERCNKS KSNKPFAVWA AECGIPGVSV AEALKRVDFW | |
| | IADGFASSKE HRELQKGVKD RLKRKVSDPE IDNRSMESVA WMARELAHRV | |
| | QYYFDEKHTG TKVRVFRGSL TSAARKASGF ESRVNFIGGN GKTRLDRRHH | |
| | AMDAATVAML RNSVAKTLVL RGNIRASERA IGAAETWKSF RGENVADRQI | |
| | FESWSENMRV LVEKFNLALY NDEVSIFSSL RLQLGNGKAH DDTITKLQMH | |
| | KVGDAWSLTE IDRASTPALW CALTRQPDFT WKDGLPANED RTIIVNGTHY | |
| | GPLDKVGIFG KAAASLLVRG GSVDIGSAIH HARIYRIAGK KPTYGMVRVF | |
| | APDLLRYRNE DLFNVELPPQ SVSMRYAEPK VREAIREGKA EYLGWLVVGD | |
| | ELLLDLSSET SGQIAELQQD FPGTTHWTVA GFFSPSRLRL RPVYLAQEGL | |
| | GEDVSEGSKS IIAGQGWRPA VNKVFGSAMP EVIRRDGLGR KRRFSYSGLP | |
| | VSWQG | |
| Caenispirillum | MPVLSPLSPN AAQGRRRWSL ALDIGEGSIG WAVAEVDAEG RVLQLTGTGV | (SEQ |
| salinarum AK4 | TLFPSAWSNE NGTYVAHGAA DRAVRGQQQR HDSRRRRLAG LARLCAPVLE | ID NO: |
| WP_009541330.1 | RSPEDLKDLT RTPPKADPRA IFFLRADAAR RPLDGPELFR VLHHMAAHRG | 113) |
| | IRLAELQEVD PPPESDADDA APAATEDEDG TRRAAADERA FRRLMAEHMH | |
| | RHGTQPTCGE IMAGRLRETP AGAQPVTRAR DGLRVGGGVA VPTRALIEQE | |
| | FDAIRAIQAP RHPDLPWDSL RRLVLDQAPI AVPPATPCLF LEELRRRGET | |
| | FQGRTITREA IDRGLTVDPL IQALRIRETV GNLRLHERIT EPDGRQRYVP | |
| | RAMPELGLSH GELTAPERDT LVRALMHDPD GLAAKDGRIP YTRLRKLIGY | |
| | DNSPVCFAQE RDTSGGGITV NPTDPLMARW IDGWVDLPLK ARSLYVRDVV | |
| | ARGADSAALA RLLAEGAHGV PPVAAAAVPA ATAAILESDI MQPGRYSVCP | |
| | WAAEAILDAW ANAPTEGFYD VTRGLFGFAP GEIVLEDLRR ARGALLAHLP | |
| | RTMAAARTPN RAAQQRGPLP AYESVIPSQL ITSLRRAHKG RAADWSAADP | |
| | EERNPFLRTW TGNAATDHIL NQVRKTANEV ITKYGNRRGW DPLPSRITVE | |
| | LAREAKHGVI RRNEIAKENR ENEGRRKKES AALDTFCQDN TVSWQAGGLP | |
| | KERAALRLRL AQRQEFFCPY CAERPKLRAT DLFSPAETEI DHVIERRMGG | |
| | DGPDNLVLAH KDCNNAKGKK TPHEHAGDLL DSPALAALWQ GWRKENADRL | |
| | KGKGHKARTP REDKDFMDRV GWRFEEDARA KAEENQERRG RRMLHDTARA | |
| | TRLARLYLAA AVMPEDPAEI GAPPVETPPS PEDPTGYTAI YRTISRVQPV | |
| | NGSVTHMLRQ RLLQRDKNRD YQTHHAEDAC LLLLAGPAVV QAFNTEAAQH | |
| | GADAPDDRPV DLMPTSDAYH QQRRARALGR VPLATVDAAL ADIVMPESDR | |
| | QDPETGRVHW RLTRAGRGLK RRIDDLTRNC VILSRPRRPS ETGTPGALHN | |
| | ATHYGRREIT VDGRTDTVVT QRMNARDLVA LLDNAKIVPA ARLDAAAPGD | |
| | TILKEICTEI ADRHDRVVDP EGTHARRWIS ARLAALVPAH AEAVARDIAE | |
| | LADLDALADA DRTPEQEARR SALRQSPYLG RAISAKKADG RARAREQEIL | |
| | TRALLDPHWG PRGLRHLIMR EARAPSLVRI RANKTDAFGR PVPDAAVWVK | |
| | TDGNAVSQLW RLTSVVTDDG RRIPLPKPIE KRIEISNLEY ARLNGLDEGA | |
| | GVTGNNAPPR PLRQDIDRLT PLWRDHGTAP GGYLGTAVGE LEDKARSALR | |
| | GKAMRQTLTD AGITAEAGWR LDSEGAVCDL EVAKGDTVKK DGKTYKVGVI | |
| | TQGIFGMPVD AAGSAPRTPE DCEKFEEQYG IKPWKAKGIP LA | |
| Coriobacterium | MKLRGIEDDY SIGLDMGTSS VGWAVTDERG TLAHFKRKPT WGSRLFREAQ | (SEQ |
| glomerans | TAAVARMPRG QRRRYVRRRW RLDLLQKLFE QQMEQADPDF FIRLRQSRLL | ID NO: |
| PW2 | RDDRAEEHAD YRWPLFNDCK FTERDYYQRF PTIYHVRSWL METDEQADIR | 114) |
| WP_ | LIYLALHNIV KHRGNFLREG QSLSAKSARP DEALNHLRET LRVWSSERGF | |
| 013709575.1 | ECSIADNGSI LAMLTHPDLS PSDRRKKIAP LFDVKSDDAA ADKKLGIALA | |
| | GAVIGLKTEF KNIFGDFPCE DSSIYLSNDE AVDAVRSACP DDCAELFDRL | |
| | CEVYSAYVLQ GLLSYAPGQT ISANMVEKYR RYGEDLALLK KLVKIYAPDQ | |
| | YRMFFSGATY PGTGIYDAAQ ARGYTKYNLG PKKSEYKPSE SMQYDDFRKA | |
| | VEKLFAKTDA RADERYRMMM DRFDKQQFLR RLKTSDNGSI YHQLHLEELK | |
| | AIVENQGRFY PFLKRDADKL VSLVSFRIPY YVGPLSTRNA RTDQHGENRF | |
| | AWSERKPGMQ DEPIFPWNWE SIIDRSKSAE KFILRMTGMC TYLQQEPVLP | |
| | KSSLLYEEFC VLNELNGAHW SIDGDDEHRF DAADREGIIE ELFRRKRTVS | |
| | YGDVAGWMER ERNQIGAHVC GGQGEKGFES KLGSYIFFCK DVFKVERLEQ | |
| | SDYPMIERII LWNTLFEDRK ILSQRLKEEY GSRLSAEQIK TICKKRFTGW | |
| | GRLSEKFLTG ITVQVDEDSV SIMDVLREGC PVSGKRGRAM VMMEILRDEE | |
| | LGFQKKVDDF NRAFFAENAQ ALGVNELPGS PAVRRSLNQS IRIVDEIASI | |
| | AGKAPANIFI EVTRDEDPKK KGRRTKRRYN DLKDALEAFK KEDPELWREL | |
| | CETAPNDMDE RLSLYFMQRG KCLYSGRAID IHQLSNAGIY EVDHIIPRTY | |
| | VKDDSLENKA LVYREENQRK TDMLLIDPEI RRRMSGYWRM LHEAKLIGDK | |
| | KFRNLLRSRI DDKALKGFIA RQLVETGQMV KLVRSLLEAR YPETNIISVK | |
| | ASISHDLRTA AELVKCREAN DFHHAHDAFL ACRVGLFIQK RHPCVYENPI | |
| | GLSQWVRNYV RQQADIFKRC RTIPGSSGFI VNSFMTSGFD KETGEIFKDD | |
| | WDAEAEVEGI RRSLNFRQCF ISRMPFEDHG VFWDATIYSP RAKKTAALPL | |
| | KQGLNPSRYG SFSREQFAYF FIYKARNPRK EQTLFEFAQV PVRLSAQIRQ | |
| | DENALERYAR ELAKDQGLEF IRIERSKILK NQLIEIDGDR LCITGKEEVR | |
| | NACELAFAQD EMRVIRMLVS EKPVSRECVI SLFNRILLHG DQASRRLSKQ | |
| | LKLALLSEAF SEASDNVQRN VVLGLIAIFN GSTNMVNLSD IGGSKFAGNV | |
| | RIKYKKELAS PKVNVHLIDQ SVTGMFERRT KIGL | |

[0223] In some embodiments, prime editors utilized herein comprise CRISPR-Cas system enzymes other than type II enzymes. In certain embodiments, prime editors comprise type V or type VI CRISPR-Cas system enzymes. It will be appreciated that certain CRISPR enzymes exhibit promiscuous ssDNA cleavage activity and appropriate precautions should be considered. In certain embodiments, prime editors comprise a nickase or a dead CRISPR with nuclease function comprised in a different component.

[0224] In various embodiments, the nucleic acid programmable DNA binding proteins utilized herein include, without limitation, Cas9 (e.g., dCas9 and nCas9), Cas12a (Cpf1), Cas12b1 (C2c1), Cas12b2, Cas12c (C2c3), Cas12d (CasY), Cas12e (CasX), C2c4, C2c5, C2c8, C2c9, C2c10, Cas13a (C2c2), Cas13b (C2c6), Cas13c (C2c7), Cas13d, and Argonaute. Cas-equivalents further include those described in Makarova et al., “C2c2 is a single-component programmable RNA-guided RNA-targeting CRISPR effector,” Science 2016; 353(6299) and Makarova et al., “Classification and Nomenclature of CRISPR-Cas Systems: Where from Here?,” The CRISPR Journal, Vol. 1. No. 5, 2018, the contents of which are incorporated herein by reference. One example of a nucleic acid programmable DNA-binding protein that has different PAM specificity than Cas9 is Clustered Regularly Interspaced Short Palindromic Repeats from Prevotella and Francisella 1 (i.e, Cas12a (Cpf1)). Similar to Cas9, Cas12a (Cpf1) is also a Class 2 CRISPR effector, but it is a member of type V subgroup of enzymes, rather than the type II subgroup. It has been shown that Cas12a (Cpf1) mediates robust DNA interference with features distinct from Cas9. Cas12a (Cpf1) is a single RNA-guided endonuclease lacking tracrRNA, and it utilizes a T-rich protospacer-adjacent motif (TTN, TTTN, or YTN). Moreover, Cpf1 cleaves DNA via a staggered DNA double-stranded break. Out of 16 Cpf1-family proteins, two enzymes from Acidaminococcus and Lachnospiraceae are shown to have efficient genome-editing activity in human cells. Cpf1 proteins are known in the art and have been described previously, for example Yamano et al., “Crystal structure of Cpf1 in complex with guide RNA and target DNA.” Cell (165) 2016, p. 949-962; the entire contents of which is hereby incorporated by reference.

### 6.3. Type V CRISPR Proteins

[0225] In some embodiments, prime editors used herein comprise the type V CRISPR family includes Francisella novicida U112 Cpf1 (FnCpf1) also known as FnCas12a. FnCpf1 adopts a bilobed architecture with the two lobes connected by the wedge (WED) domain. The N-terminal REC lobe consists of two a-helical domains (REC1 and REC2) that have been shown to coordinate the crRNA-target DNA heteroduplex. The C-terminal NUC lobe consists of the C-terminal RuvC and Nuc domains involved in target cleavage, the arginine-rich bridge helix (BH), and the PAM-interacting (PI) domain. The repeat-derived segment of the crRNA forms a pseudoknot stabilized by intra-molecular base-pairing and hydrogen-bonding interactions. The pseudoknot is coordinated by residues from the WED, RuvC, and REC2 domains, as well as by two hydrated magnesium cations. Notably, nucleotides 1-5 of the crRNA are ordered in the central cavity of FnCas12a and adopt an A-form-like helical conformation. Conformational ordering of the seed sequence is facilitated by multiple interactions between the ribose and phosphate moieties of the crRNA backbone and FnCpf1 residues in the WED and REC1 domains. These include residues Thr16, Lys595, His804, and His881 from the WED domain and residues Tyr47, Lys51, Phe182, and Arg186 from the REC1 domain. The structure of the FnCas12a-crRNA complex further reveals that the bases of the seed sequence are solvent exposed and poised for hybridization with target DNA. Structural aspects of FnCpf1 are described by Swarts et al., Structural Basis for Guide RNA Processing and Seed-Dependent DNA Targeting by CRISPR-Cas12a, Molecular Cell 66, 221-233, Apr. 20, 2017.

[0226] Pre-crRNA processing: Essential residues for crRNA processing include His843, Lys852, and Lys869. Structural observations are consistent with an acid-base catalytic mechanism in which Lys869 acts as the general base catalyst to deprotonate the attacking 2′-hydroxyl group of U(-19), while His843 acts as a general acid to protonate the 5′-oxygen leaving group of A(-18). In turn, the side chain of Lys852 is involved in charge stabilization of the transition state. Collectively, these interactions facilitate the intra-molecular attack of the 20-hydroxyl group of U(-19) on the scissile phosphate and promote the formation of the 2′,3′-cyclic phosphate product.

[0227] R-loop formation: The crRNA-target DNA strand heteroduplex is enclosed in the central cavity formed by the REC and NUC lobes and interacts extensively with the REC1 and REC2 domains. The PAM-containing DNA duplex comprises target strand nucleotides dT0-dT8 and non-target strand nucleotides dA(8)*-dA0* and is contacted by the PI, WED, and REC1 domains. The 5′-TTN-3′ PAM is recognized in FnCas12a by a mechanism combining the shape-specific recognition of a narrowed minor groove, with base-specific recognition of the PAM bases by two invariant residues, Lys671 and Lys613. Directly downstream of the PAM, the duplex of the target DNA is disrupted by the side chain of residue Lys667, which is inserted between the DNA strands and forms a cation-π stacking interaction with the dA0-dT0* base pair. The phosphate group linking target strand residues dT(-1) and dT0 is coordinated by hydrogen-bonding interactions with the side chain of Lys823 and the backbone amide of Gly826. Target strand residue dT(-1) bends away from residue TO, allowing the target strand to interact with the seed sequence of the crRNA. The non-target strand nucleotides dT1*-dT5* interact with the Arg692-Ser702 loop in FnCas12a through hydrogen-bonding and ionic interactions between backbone phosphate groups and side chains of Arg692, Asn700, Ser702, and Gln704, as well as main-chain amide groups of Lys699, Asn700, and Ser702. Alanine substitution of Q704 or replacement of residues Thr698-Ser702 in FnCas12a with the sequence Ala-Gly3 (SEQ ID NO: 115) substantially reduced DNA cleavage activity, suggesting that these residues contribute to R-loop formation by stabilizing the displaced conformation of the nontarget DNA strand.

[0228] In the FnCas12a R-loop complex, the crRNA-target strand heteroduplex is terminated by a stacking interaction with a conserved aromatic residue (Tyr410). This prevents base pairing between the crRNA and the target strand beyond nucleotides U20 and dA(-20), respectively. Beyond this point, the target DNA strand nucleotides re-engage the non-target DNA strand, forming a PAM-distal DNA duplex comprising nucleotides dC(-21)-dA(-27) and dG21*-dT27*, respectively. The duplex is confined between the REC2 and Nuc domains at the end of the central channel formed by the REC and NUC lobes.

[0229] Target DNA cleavage: FnCpf1 can independently accommodate both the target and non-target DNA strands in the catalytic pocket of the RuvC domain. The RuvC active site contains three catalytic residues (D917, E1006, and D1255). Structural observations suggest that both the target and non-target DNA strands are cleaved by the same catalytic mechanism in a single active site in Cpf1/Cas12a enzymes.

[0230] Another type V CRISPR is AsCpf1 from Acidaminococcus sp BV3L6 (Yamano et al., Crystal structure of Cpf1 in complex with guide RNA and target DNA, Cell 165, 949-962, May 5, 2016)

[0231] In certain embodiments, the nuclease comprises a Cas12f effector. Small CRISPR-associated effector proteins belonging to the type V-F subtype have been identified through the mining of sequence databases and members classified into Cas12f1 (Cas14a and type V-U3), Cas12f2 (Cas14b) and Cas12f3 (Cas14c, type V-U2 and U4). (See, e.g., Karvelis et al., PAM recognition by miniature CRISPR-Cas12f nucleases triggers programmable double-stranded DNA target cleavage. Nucleic Acids Research, 21 May 2020, 48(9), 5016-23 doi.org/10.1093/nar/gkaa208). Xu et al. described development of a 529 amino acid Cas12f-based system for mammalian genome engineering through multiple rounds of iterative protein engineering and screening. (Xu, X. et al., Engineered Miniature CRISPR-Cas System for Mammalian Genome Regulation and Editing. Molecular Cell, Oct. 21, 2021, 81(20): 4333-45, doi.org/10.1016/j.molcel.2021.08.008).

[0232] Exemplary CRISPR-Cas proteins and enzymes used in the prime editors herein include the following without limitation.

TABLE 5
Cas12a orthologs

| | | |
|---|---|---|
| KKP36646_ | MSNFFKNFTN LYELSKTLRF ELKPVGDTLT NMKDHLEYDE KLQTFLKDQN | (SEQ |
| (modified) | IDDAYQALKP QFDEIHEEFI TDSLESKKAK EIDFSEYLDL FQEKKELNDS | ID NO: |
| hypothetical | EKKLRNKIGE TFNKAGEKWK KEKYPQYEWK KGSKIANGAD ILSCQDMLQF | 116) |
| protein | IKYKNPEDEK IKNYIDDTLK GFFTYFGGFN QNRANYYETK KEASTAVATR | |
| UR27_C0015G0 | IVHENLPKFC DNVIQFKHII KRKKDGTVEK TERKTEYLNA YQYLKNNNKI | |
| 004 [Candidatus | TQIKDAETEK MIESTPIAEK IFDVYYFSSC LSQKQIEEYN RIIGHYNLLI | |
| Peregrinibacteria | NLYNQAKRSE GKHLSANEKK YKDLPKFKTL YKQIGCGKKK DLFYTIKCDT | |
| bacterium | EEEANKSRNE GKESHSVEEI INKAQEAINK YFKSNNDCEN INTVPDFINY | |
| GW2011_GWA2 | ILTKENYEGV YWSKAAMNTI SDKYFANYHD LQDRLKEAKV FQKADKKSED | |
| _33_10] | DIKIPEAIEL SGLFGVLDSL ADWQTTLFKS SILSNEDKLK IITDSQTPSE | |
| | ALLKMIFNDI EKNMESFLKE TNDIITLKKY KGNKEGTEKI KQWFDYTLAI | |
| | NRMLKYFLVK ENKIKGNSLD TNISEALKTL IYSDDAEWFK WYDALRNYLT | |
| | QKPQDEAKEN KLKLNFDNPS LAGGWDVNKE CSNFCVILKD KNEKKYLAIM | |
| | KKGENTLFQK EWTEGRGKNL TKKSNPLFEI NNCEILSKME YDFWADVSKM | |
| | IPKCSTQLKA VVNHFKQSDN EFIFPIGYKV TSGEKFREEC KISKQDFELN | |
| | NKVFNKNELS VTAMRYDLSS TQEKQYIKAF QKEYWELLFK QEKRDTKLTN | |
| | NEIFNEWINF CNKKYSELLS WERKYKDALT NWINFCKYFL SKYPKTTLFN | |
| | YSFKESENYN SLDEFYRDVD ICSYKLNINT TINKSILDRL VEEGKLYLFE | |
| | IKNQDSNDGK SIGHKNNLHT IYWNAIFENF DNRPKLNGEA EIFYRKAISK | |
| | DKLGIVKGKK TKNGTEIIKN YRFSKEKFIL HVPITLNFCS NNEYVNDIVN | |
| | TKFYNFSNLH FLGIDRGEKH LAYYSLVNKN GEIVDQGTLN LPFTDKDGNQ | |
| | RSIKKEKYFY NKQEDKWEAK EVDCWNYNDL LDAMASNRDM ARKNWQRIGT | |
| | IKEAKNGYVS LVIRKIADLA VNNERPAFIV LEDLNTGFKR SRQKIDKSVY | |
| | QKFELALAKK LNFLVDKNAK RDEIGSPTKA LQLTPPVNNY GDIENKKQAG | |
| | IMLYTRANYT SQTDPATGWR KTIYLKAGPE ETTYKKDGKI KNKSVKDQII | |
| | ETFTDIGFDG KDYYFEYDKG EFVDEKTGEI KPKKWRLYSG ENGKSLDRFR | |
| | GEREKDKYEW KIDKIDIVKI LDDLFVNFDK NISLLKQLKE GVELTRNNEH | |
| | GTGESLRFAI NLIQQIRNTG NNERDNDFIL SPVRDENGKH FDSREYWDKE | |
| | TKGEKISMPS SGDANGAFNI ARKGIIMNAH ILANSDSKDL SLFVSDEEWD | |
| | LHLNNKTEWK KQLNIFSSRK AMAKRKK | |
| KKR91555_ | MLFFMSTDIT NKPREKGVFD NFTNLYEFSK TLTFGLIPLK WDDNKKMIVE | (SEQ |
| (modified) | DEDFSVLRKY GVIEEDKRIA ESIKIAKFYL NILHRELIGK VLGSLKFEKK | ID NO: |
| hypothetical | NLENYDRLLG EIEKNNKNEN ISEDKKKEIR KNFKKELSIA QDILLKKVGE | 117) |
| protein | VFESNGSGIL SSKNCLDELT KRFTRQEVDK LRRENKDIGV EYPDVAYREK | |
| UU43_ | DGKEETKSFF AMDVGYLDDF HKNRKQLYSV KGKKNSLGRR ILDNFEIFCK | |
| C0004G0003 | NKKLYEKYKN LDIDFSEIER NFNLTLEKVF DFDNYNERLT QEGLDEYAKI | |
| [Parcubacteria | LGGESNKQER TANIHGLNQI INLYIQKKQS EQKAEQKETG KKKIKFNKKD | |
| (Falkowbacteria) | YPTFTCLQKQ ILSQVFRKEI IIESDRDLIR ELKFFVEESK EKVDKARGII | |
| bacterium | EFLLNHEEND IDLAMVYLPK SKINSFVYKV FKEPQDFLSV FQDGASNLDF | |
| GW2011_GWA2 | VSFDKIKTHL ENNKLTYKIF FKTLIKENHD FESFLILLQQ EIDLLIDGGE | |
| _41_14] | TVTLGGKKES ITSLDEKKNR LKEKLGWFEG KVRENEKMKD EEEGEFCSTV | |
| | LAYSQAVLNI TKRAEIFWLN EKQDAKVGED NKDMIFYKKF DEFADDGFAP | |
| | FFYFDKFGNY LKRRSRNTTK EIKLHFGNDD LLEGWDMNKE PEYWSFILRD | |
| | RNQYYLGIGK KDGEIFHKKL GNSVEAVKEA YELENEADFY EKIDYKQLNI | |
| | DRFEGIAFPK KTKTEEAFRQ VCKKRADEFL GGDTYEFKIL LAIKKEYDDF | |
| | KARRQKEKDW DSKFSKEKMS KLIEYYITCL GKRDDWKRFN LNFRQPKEYE | |
| | DRSDFVRHIQ RQAYWIDPRK VSKDYVDKKV AEGEMFLFKV HNKDFYDFER | |
| | KSEDKKNHTA NLFTQYLLEL FSCENIKNIK SKDLIESIFE LDGKAEIRFR | |
| | PKTDDVKLKI YQKKGKDVTY ADKRDGNKEK EVIQHRRFAK DALTLHLKIR | |
| | LNFGKHVNLF DFNKLVNTEL FAKVPVKILG MDRGENNLIY YCFLDEHGEI | |
| | ENGKCGSLNR VGEQIITLED DKKVKEPVDY FQLLVDREGQ RDWEQKNWQK | |
| | MTRIKDLKKA YLGNVVSWIS KEMLSGIKEG VVTIGVLEDL NSNFKRTRFF | |
| | RERQVYQGFE KALVNKLGYL VDKKYDNYRN VYQFAPIVDS VEEMEKNKQI | |
| | GTLVYVPASY TSKICPHPKC GWRERLYMKN SASKEKIVGL LKSDGIKISY | |
| | DQKNDRFYFE YQWEQEHKSD GKKKKYSGVD KVFSNVSRMR WDVEQKKSID | |
| | FVDGTDGSIT NKLKSLLKGK GIELDNINQQ IVNQQKELGV EFFQSIIFYF | |
| | NLIMQIRNYD KEKSGSEADY IQCPSCLFDS RKPEMNGKLS AITNGDANGA | |
| | YNIARKGFMQ LCRIRENPQE PMKLITNREW DEAVREWDIY SAAQKIPVLS | |
| | EEN | |
| KDN25524_ | MLFQDFTHLY PLSKTVRFEL KPIDRTLEHI HAKNFLSQDE TMADMHQKVK | (SEQ |
| (modified) | VILDDYHRDF IADMMGEVKL TKLAEFYDVY LKFRKNPKDD ELQKQLKDLQ | ID NO: |
| hypothetical | AVLRKEIVKP IGNGGKYKAG YDRLFGAKLF KDGKELGDLA KFVIAQEGES | 118) |
| protein | SPKLAHLAHF EKFSTYFTGF HDNRKNMYSD EDKHTAIAYR LIHENLPRFI | |
| MBO_03467 | DNLQILTTIK QKHSALYDQI INELTASGLD VSLASHLDGY HKLLTQEGIT | |
| [Moraxella | AYNTLLGGIS GEAGSPKIQG INELINSHHN QHCHKSERIA KLRPLHKQIL | |
| bovoculi 237] | SDGMSVSFLP SKFADDSEMC QAVNEFYRHY ADVFAKVQSL FDGFDDHQKD | |
| >WP_052585281.1 | GIYVEHKNLN ELSKQAFGDF ALLGRVLDGY YVDVVNPEFN ERFAKAKTDN | |
| type V CRISPR- | AKAKLTKEKD KFIKGVHSLA SLEQAIEHYT ARHDDESVQA GKLGQYFKHG | |
| associated | LAGVDNPIQK IHNNHSTIKG FLERERPAGE RALPKIKSGK NPEMTQLRQL | |
| protein Cpf1 | KELLDNALNV AHFAKLLTTK TTLDNQDGNF YGEFGVLYDE LAKIPTLYNK | |
| [Moraxella | VRDYLSQKPF STEKYKLNFG NPTLLNGWDL NKEKDNFGVI LQKDGCYYLA | |
| bovoculi] | LLDKAHKKVF DNAPNTGKSI YQKMIYKYLE VRKQFPKVFF SKEAIAINYH | |
| | PSKELVEIKD KGRQRSDDER LKLYRFILEC LKIHPKYDKK FEGAIGDIQL | |
| | FKKDKKGREV PISEKDLFDK INGIFSSKPK LEMEDFFIGE FKRYNPSQDL | |
| | VDQYNIYKKI DSNDNRKKEN FYNNHPKFKK DLVRYYYESM CKHEEWEESF | |
| | EFSKKLQDIG CYVDVNELFT EIETRRLNYK ISFCNINADY IDELVEQGQL | |
| | YLFQIYNKDF SPKAHGKPNL HTLYFKALFS EDNLADPIYK LNGEAQIFYR | |
| | KASLDMNETT IHRAGEVLEN KNPDNPKKRQ FVYDIIKDKR YTQDKFMLHV | |
| | PITMNFGVQG MTIKEFNKKV NQSIQQYDEV NVIGIDRGER HLLYLTVINS | |
| | KGEILEQCSL NDITTASANG TQMTTPYHKI LDKREIERLN ARVGWGEIET | |
| | IKELKSGYLS HVVHQISQLM LKYNAIVVLE DLNFGFKRGR FKVEKQIYQN | |
| | FENALIKKLN HLVLKDKADD EIGSYKNALQ LTNNFTDLKS IGKQTGFLFY | |
| | VPAWNTSKID PETGFVDLLK PRYENIAQSQ AFFGKFDKIC YNADKDYFEF | |
| | HIDYAKFTDK AKNSRQIWTI CSHGDKRYVY DKTANQNKGA AKGINVNDEL | |
| | KSLFARHHIN EKQPNLVMDI CQNNDKEFHK SLMYLLKTLL ALRYSNASSD | |
| | EDFILSPVAN DEGVFFNSAL ADDTQPQNAD ANGAYHIALK GLWLLNELKN | |
| | SDDLNKVKLA IDNQTWLNFA QNR | |
| KKT48220_ | MENIFDQFIG KYSLSKTLRF ELKPVGKTED FLKINKVFEK DQTIDDSYNQ | (SEQ |
| (modified) | AKFYFDSLHQ KFIDAALASD KTSELSFQNF ADVLEKQNKI ILDKKREMGA | ID NO: |
| hypothetical | LRKRDKNAVG IDRLQKEIND AEDIIQKEKE KIYKDVRTLF DNEAESWKTY | 119) |
| protein | YQEREVDGKK ITFSKADLKQ KGADFLTAAG ILKVLKYEFP EEKEKEFQAK | |
| UW39_C0001G0 | NQPSLFVEEK ENPGQKRYIF DSFDKFAGYL TKFQQTKKNL YAADGTSTAV | |
| 044 | ATRIADNFII FHQNTKVFRD KYKNNHTDLG FDEENIFEIE RYKNCLLQRE | |
| [Parcubacteria | IEHIKNENSY NKIIGRINKK IKEYRDQKAK DTKLTKSDFP FFKNLDKQIL | |
| bacterium | GEVEKEKQLI EKTREKTEED VLIERFKEFI ENNEERFTAA KKLMNAFCNG | |
| GW2011_GWC2 | EFESEYEGIY LKNKAINTIS RRWFVSDRDF ELKLPQQKSK NKSEKNEPKV | |
| _44_17] | KKFISIAEIK NAVEELDGDI FKAVFYDKKI IAQGGSKLEQ FLVIWKYEFE | |
| | YLFRDIEREN GEKLLGYDSC LKIAKQLGIF PQEKEAREKA TAVIKNYADA | |
| | GLGIFQMMKY FSLDDKDRKN TPGQLSTNFY AEYDGYYKDF EFIKYYNEFR | |
| | NFITKKPFDE DKIKLNFENG ALLKGWDENK EYDFMGVILK KEGRLYLGIM | |
| | HKNHRKLFQS MGNAKGDNAN RYQKMIYKQI ADASKDVPRL LLTSKKAMEK | |
| | FKPSQEILRI KKEKTFKRES KNFSLRDLHA LIEYYRNCIP QYSNWSFYDF | |
| | QFQDTGKYQN IKEFTDDVQK YGYKISFRDI DDEYINQALN EGKMYLFEWV | |
| | NKDIYNTKNG SKNLHTLYFE HILSAENLND PVFKLSGMAE IFQRQPSVNE | |
| | REKITTQKNQ CILDKGDRAY KYRRYTEKKI MFHMSLVLNT GKGEIKQVQF | |
| | NKIINQRISS SDNEMRVNVI GIDRGEKNLL YYSVVKQNGE IIEQASLNEI | |
| | NGVNYRDKLI EREKERLKNR QSWKPVVKIK DLKKGYISHV IHKICQLIEK | |
| | YSAIVVLEDL NMRFKQIRGG IERSVYQQFE KALIDKLGYL VFKDNRDLRA | |
| | PGGVLNGYQL SAPFVSFEKM RKQTGILFYT QAEYTSKTDP ITGFRKNVYI | |
| | SNSASLDKIK EAVKKFDAIG WDGKEQSYFF KYNPYNLADE KYKNSTVSKE | |
| | WAIFASAPRI RRQKGEDGYW KYDRVKVNEE FEKLLKVWNF VNPKATDIKQ | |
| | EIIKKEKAGD LQGEKELDGR LRNFWHSFIY LENLVLELRN SFSLQIKIKA | |
| | GEVIAVDEGV DFIASPVKPF FTTPNPYIPS NLCWLAVENA DANGAYNIAR | |
| | KGVMILKKIR EHAKKDPEFK KLPNLFISNA EWDEAARDWG KYAGTTALNL | |
| | DH | |
| WP_031492824 | MSSLTKFTNK YSKQLTIKNE LIPVGKTLEN IKENGLIDGD EQLNENYQKA | (SEQ |
| (modified) | KIIVDDFLRD FINKALNNTQ IGNWRELADA LNKEDEDNIE KLQDKIRGII | ID NO: |
| hypothetical | VSKFETFDLF SSYSIKKDEK IIDDDNDVEE EELDLGKKTS SFKYIFKKNL | 120) |
| protein | FKLVLPSYLK TTNQDKLKII SSFDNFSTYF RGFFENRKNI FTKKPISTSI | |
| [Succinivibrio | AYRIVHDNFP KFLDNIRCFN VWQTECPQLI VKADNYLKSK NVIAKDKSLA | |
| dextrinosolvens] | NYFTVGAYDY FLSQNGIDFY NNIIGGLPAF AGHEKIQGLN EFINQECQKD | |
| | SELKSKLKNR HAFKMAVLFK QILSDREKSF VIDEFESDAQ VIDAVKNFYA | |
| | EQCKDNNVIF NLLNLIKNIA FLSDDELDGI FIEGKYLSSV SQKLYSDWSK | |
| | LRNDIEDSAN SKQGNKELAK KIKTNKGDVE KAISKYEFSL SELNSIVHDN | |
| | TKFSDLLSCT LHKVASEKLV KVNEGDWPKH LKNNEEKQKI KEPLDALLEI | |
| | YNTLLIFNCK SFNKNGNFYV DYDRCINELS SWVYLYNKTR NYCTKKPYNT | |
| | DKFKLNFNSP QLGEGFSKSK ENDCLTLLFK KDDNYYVGII RKGAKINFDD | |
| | TQAIADNTDN CIFKMNYFLL KDAKKFIPKC SIQLKEVKAH FKKSEDDYIL | |
| | SDKEKFASPL VIKKSTFLLA TAHVKGKKGN IKKFQKEYSK ENPTEYRNSL | |
| | NEWIAFCKEF LKTYKAATIF DITTLKKAEE YADIVEFYKD VDNLCYKLEF | |
| | CPIKTSFIEN LIDNGDLYLF RINNKDFSSK STGTKNLHTL YLQAIFDERN | |
| | LNNPTIMLNG GAELFYRKES IEQKNRITHK AGSILVNKVC KDGTSLDDKI | |
| | RNEIYQYENK FIDTLSDEAK KVLPNVIKKE ATHDITKDKR FTSDKFFFHC | |
| | PLTINYKEGD TKQFNNEVLS FLRGNPDINI IGIDRGERNL IYVTVINQKG | |
| | EILDSVSFNT VTNKSSKIEQ TVDYEEKLAV REKERIEAKR SWDSISKIAT | |
| | LKEGYLSAIV HEICLLMIKH NAIVVLENLN AGFKRIRGGL SEKSVYQKFE | |
| | KMLINKLNYF VSKKESDWNK PSGLLNGLQL SDQFESFEKL GIQSGFIFYV | |
| | PAAYTSKIDP TTGFANVLNL SKVRNVDAIK SFFSNFNEIS YSKKEALFKF | |
| | SFDLDSLSKK GFSSFVKFSK SKWNVYTFGE RIIKPKNKQG YREDKRINLT | |
| | FEMKKLLNEY KVSFDLENNL IPNLTSANLK DTFWKELFFI FKTTLQLRNS | |
| | VTNGKEDVLI SPVKNAKGEF FVSGTHNKTL PQDCDANGAY HIALKGLMIL | |
| | ERNNLVREEK DTKKIMAISN VDWFEYVQKR RGVL | |
| KKT50231_ | MKPVGKTEDF LKINKVFEKD QTIDDSYNQA KFYFDSLHQK FIDAALASDK | (SEQ |
| (modified) | TSELSFQNFA DVLEKQNKII LDKKREMGAL RKRDKNAVGI DRLQKEINDA | ID NO: |
| hypothetical | EDIIQKEKEK IYKDVRTLFD NEAESWKTYY QEREVDGKKI TFSKADLKQK | 121) |
| protein | GADFLTAAGI LKVLKYEFPE EKEKEFQAKN QPSLFVEEKE NPGQKRYIFD | |
| UW40_ | SFDKFAGYLT KFQQTKKNLY AADGTSTAVA TRIADNFIIF HQNTKVFRDK | |
| C0007G0006 | YKNNHTDLGF DEENIFEIER YKNCLLQREI EHIKNENSYN KIIGRINKKI | |
| [Parcubacteria | KEYRDQKAKD TKLTKSDFPF FKNLDKQILG EVEKEKQLIE KTREKTEEDV | |
| bacterium | LIERFKEFIE NNEERFTAAK KLMNAFCNGE FESEYEGIYL KNKAINTISR | |
| GW2011_GWF2 | RWFVSDRDFE LKLPQQKSKN KSEKNEPKVK KFISIAEIKN AVEELDGDIF | |
| _44_17] | KAVFYDKKII AQGGSKLEQF LVIWKYEFEY LFRDIERENG EKLLGYDSCL | |
| | KIAKQLGIFP QEKEAREKAT AVIKNYADAG LGIFQMMKYF SLDDKDRKNT | |
| | PGQLSTNFYA EYDGYYKDFE FIKYYNEFRN FITKKPFDED KIKLNFENGA | |
| | LLKGWDENKE YDFMGVILKK EGRLYLGIMH KNHRKLFQSM GNAKGDNANR | |
| | YQKMIYKQIA DASKDVPRLL LTSKKAMEKF KPSQEILRIK KEKTFKRESK | |
| | NFSLRDLHAL IEYYRNCIPQ YSNWSFYDFQ FQDTGKYQNI KEFTDDVQKY | |
| | GYKISFRDID DEYINQALNE GKMYLFEWVN KDIYNTKNGS KNLHTLYFEH | |
| | ILSAENLNDP VFKLSGMAEI FQRQPSVNER EKITTQKNQC ILDKGDRAYK | |
| | YRRYTEKKIM FHMSLVLNTG KGEIKQVQFN KIINQRISSS DNEMRVNVIG | |
| | IDRGEKNLLY YSVVKQNGEI IEQASLNEIN GVNYRDKLIE REKERLKNRQ | |
| | SWKPVVKIKD LKKGYISHVI HKICQLIEKY SAIVVLEDLN MRFKQIRGGI | |
| | ERSVYQQFEK ALIDKLGYLV FKDNRDLRAP GGVLNGYQLS APFVSFEKMR | |
| | KQTGILFYTQ AEYTSKTDPI TGFRKNVYIS NSASLDKIKE AVKKFDAIGW | |
| | DGKEQSYFFK YNPYNLADEK YKNSTVSKEW AIFASAPRIR RQKGEDGYWK | |
| | YDRVKVNEEF EKLLKVWNFV NPKATDIKQE IIKKEKAGDL QGEKELDGRL | |
| | RNFWHSFIYL FNLVLELRNS FSLQIKIKAG EVIAVDEGVD FIASPVKPFF | |
| | TTPNPYIPSN LCWLAVENAD ANGAYNIARK GVMILKKIRE HAKKDPEFKK | |
| | LPNLFISNAE WDEAARDWGK YAGTTALNLD H | |
| WP_004356401 | MKVMENYQEF TNLFQLNKTL RFELKPIGKT CELLEEGKIF ASGSFLEKDK | (SEQ |
| (modified) | VRADNVSYVK KEIDKKHKIF IEETLSSFSI SNDLLKQYFD CYNELKAFKK | ID NO: |
| hypothetical | DCKSDEEEVK KTALRNKCTS IQRAMREAIS QAFLKSPQKK LLAIKNLIEN | 122) |
| protein | VFKADENVQH FSEFTSYFSG FETNRENFYS DEEKSTSIAY RLVHDNLPIF | |
| [Prevotella | IKNIYIFEKL KEQFDAKTLS EIFENYKLYV AGSSLDEVFS LEYFNNTLTQ | |
| disiens] | KGIDNYNAVI GKIVKEDKQE IQGLNEHINL YNQKHKDRRL PFFISLKKQI | |
| | LSDREALSWL PDMFKNDSEV IKALKGFYIE DGFENNVLTP LATLLSSLDK | |
| | YNLNGIFIRN NEALSSLSQN VYRNFSIDEA IDANAELQTF NNYELIANAL | |
| | RAKIKKETKQ GRKSFEKYEE YIDKKVKAID SLSIQEINEL VENYVSEFNS | |
| | NSGNMPRKVE DYFSLMRKGD FGSNDLIENI KTKLSAAEKL LGTKYQETAK | |
| | DIFKKDENSK LIKELLDATK QFQHFIKPLL GTGEEADRDL VFYGDFLPLY | |
| | EKFEELTLLY NKVRNRLTQK PYSKDKIRLC FNKPKLMTGW VDSKTEKSDN | |
| | GTQYGGYLFR KKNEIGEYDY FLGISSKAQL FRKNEAVIGD YERLDYYQPK | |
| | ANTIYGSAYE GENSYKEDKK RLNKVIIAYI EQIKQTNIKK SIIESISKYP | |
| | NISDDDKVTP SSLLEKIKKV SIDSYNGILS FKSFQSVNKE VIDNLLKTIS | |
| | PLKNKAEFLD LINKDYQIFT EVQAVIDEIC KQKTFIYFPI SNVELEKEMG | |
| | DKDKPLCLFQ ISNKDLSFAK TFSANLRKKR GAENLHTMLF KALMEGNQDN | |
| | LDLGSGAIFY RAKSLDGNKP THPANEAIKC RNVANKDKVS LFTYDIYKNR | |
| | RYMENKFLFH LSIVQNYKAA NDSAQLNSSA TEYIRKADDL HIIGIDRGER | |
| | NLLYYSVIDM KGNIVEQDSL NIIRNNDLET DYHDLLDKRE KERKANRQNW | |
| | EAVEGIKDLK KGYLSQAVHQ IAQLMLKYNA IIALEDLGQM FVTRGQKIEK | |
| | AVYQQFEKSL VDKLSYLVDK KRPYNELGGI LKAYQLASSI TKNNSDKQNG | |
| | FLFYVPAWNT SKIDPVTGFT DLLRPKAMTI KEAQDFFGAF DNISYNDKGY | |
| | FEFETNYDKF KIRMKSAQTR WTICTFGNRI KRKKDKNYWN YEEVELTEEF | |
| | KKLFKDSNID YENCNLKEEI QNKDNRKFFD DLIKLLQLTL QMRNSDDKGN | |
| | DYIISPVANA EGQFFDSRNG DKKLPLDADA NGAYNIARKG LWNIRQIKQT | |
| | KNDKKLNLSI SSTEWLDFVR EKPYLK | |
| CCB70584_(modified) | MTNKFTNQYS LSKTLRFELI PQGKTLEFIQ EKGLLSQDKQ RAESYQEMKK | (SEQ |
| Protein of | TIDKFHKYFI DLALSNAKLT HLETYLELYN KSAETKKEQK FKDDLKKVQD | ID NO: |
| unknown | NLRKEIVKSF SDGDAKSIFA ILDKKELITV ELEKWFENNE QKDIYFDEKF | 123) |
| function | KTFTTYFTGF HQNRKNMYSV EPNSTAIAYR LIHENLPKFL ENAKAFEKIK | |
| [Flavobacterium | QVESLQVNFR ELMGEFGDEG LIFVNELEEM FQINYYNDVL SQNGITIYNS | |
| branchiophilum | IISGFTKNDI KYKGLNEYIN NYNQTKDKKD RLPKLKQLYK QILSDRISLS | |
| FL-15] | FLPDAFTDGK QVLKAIFDFY KINLLSYTIE GQEESQNLLL LIRQTIENLS | |
| | SFDTQKIYLK NDTHLTTISQ QVFGDFSVFS TALNYWYETK VNPKFETEYS | |
| | KANEKKREIL DKAKAVFTKQ DYFSIAFLQE VLSEYILTLD HTSDIVKKHS | |
| | SNCIADYFKN HFVAKKENET DKTFDFIANI TAKYQCIQGI LENADQYEDE | |
| | LKQDQKLIDN LKFFLDAILE LLHFIKPLHL KSESITEKDT AFYDVFENYY | |
| | EALSLLTPLY NMVRNYVTQK PYSTEKIKLN FENAQLLNGW DANKEGDYLT | |
| | TILKKDGNYF LAIMDKKHNK AFQKFPEGKE NYEKMVYKLL PGVNKMLPKV | |
| | FFSNKNIAYF NPSKELLENY KKETHKKGDT FNLEHCHTLI DFFKDSLNKH | |
| | EDWKYFDFQF SETKSYQDLS GFYREVEHQG YKINFKNIDS EYIDGLVNEG | |
| | KLFLFQIYSK DFSPFSKGKP NMHTLYWKAL FEEQNLQNVI YKLNGQAEIF | |
| | FRKASIKPKN IILHKKKIKI AKKHFIDKKT KTSEIVPVQT IKNLNMYYQG | |
| | KISEKELTQD DLRYIDNFSI FNEKNKTIDI IKDKRFTVDK FQFHVPITMN | |
| | FKATGGSYIN QTVLEYLQNN PEVKIIGLDR GERHLVYLTL IDQQGNILKQ | |
| | ESLNTITDSK ISTPYHKLLD NKENERDLAR KNWGTVENIK ELKEGYISQV | |
| | VHKIATLMLE ENAIVVMEDL NFGFKRGRFK VEKQIYQKLE KMLIDKLNYL | |
| | VLKDKQPQEL GGLYNALQLT NKFESFQKMG KQSGFLFYVP AWNTSKIDPT | |
| | TGFVNYFYTK YENVDKAKAF FEKFEAIRFN AEKKYFEFEV KKYSDFNPKA | |
| | EGTQQAWTIC TYGERIETKR QKDQNNKFVS TPINLTEKIE DFLGKNQIVY | |
| | GDGNCIKSQI ASKDDKAFFE TLLYWFKMTL QMRNSETRTD IDYLISPVMN | |
| | DNGTFYNSRD YEKLENPTLP KDADANGAYH IAKKGLMLLN KIDQADLTKK | |
| | VDLSISNRDW LQFVQKNK | |
| WP_005398606 | MFEKLSNIVS ISKTIRFKLI PVGKTLENIE KLGKLEKDFE RSDFYPILKN | (SEQ |
| (modified) | ISDDYYRQYI KEKLSDLNLD WQKLYDAHEL LDSSKKESQK NLEMIQAQYR | ID NO: |
| hypothetical | KVLFNILSGE LDKSGEKNSK DLIKNNKALY GKLFKKQFIL EVLPDFVNNN | 124) |
| protein | DSYSEEDLEG LNLYSKFTTR LKNFWETRKN VFTDKDIVTA IPFRAVNENF | |
| [Helcococcus | GFYYDNIKIF NKNIEYLENK IPNLENELKE ADILDDNRSV KDYFTPNGFN | |
| kunzii] | YVITQDGIDV YQAIRGGFTK ENGEKVQGIN EILNLTQQQL RRKPETKNVK | |
| | LGVLTKLRKQ ILEYSESTSF LIDQIEDDND LVDRINKFNV SFFESTEVSP | |
| | SLFEQIERLY NALKSIKKEE VYIDARNTQK FSQMLFGQWD VIRRGYTVKI | |
| | TEGSKEEKKK YKEYLELDET SKAKRYLNIR EIEELVNLVE GFEEVDVFSV | |
| | LLEKFKMNNI ERSEFEAPIY GSPIKLEAIK EYLEKHLEEY HKWKLLLIGN | |
| | DDLDTDETFY PLLNEVISDY YIIPLYNLTR NYLTRKHSDK DKIKVNFDFP | |
| | TLADGWSESK ISDNRSIILR KGGYYYLGIL IDNKLLINKK NKSKKIYEIL | |
| | IYNQIPEFSK SIPNYPFTKK VKEHFKNNVS DFQLIDGYVS PLIITKEIYD | |
| | IKKEKKYKKD FYKDNNTNKN YLYTIYKWIE FCKQFLYKYK GPNKESYKEM | |
| | YDFSTLKDTS LYVNLNDFYA DVNSCAYRVL FNKIDENTID NAVEDGKLLL | |
| | FQIYNKDFSP ESKGKKNLHT LYWLSMFSEE NLRTRKLKLN GQAEIFYRKK | |
| | LEKKPIIHKE GSILLNKIDK EGNTIPENIY HECYRYLNKK IGREDLSDEA | |
| | IALFNKDVLK YKEARFDIIK DRRYSESQFF FHVPITFNWD IKTNKNVNQI | |
| | VQGMIKDGEI KHIIGIDRGE RHLLYYSVID LEGNIVEQGS LNTLEQNRFD | |
| | NSTVKVDYQN KLRTREEDRD RARKNWTNIN KIKELKDGYL SHVVHKLSRL | |
| | IIKYEAIVIM ENLNQGFKRG RFKVERQVYQ KFELALMNKL SALSFKEKYD | |
| | ERKNLEPSGI LNPIQACYPV DAYQELQGQN GIVFYLPAAY TSVIDPVTGF | |
| | TNLFRLKSIN SSKYEEFIKK FKNIYFDNEE EDFKFIFNYK DFAKANLVIL | |
| | NNIKSKDWKI STRGERISYN SKKKEYFYVQ PTEFLINKLK ELNIDYENID | |
| | IIPLIDNLEE KAKRKILKAL FDTFKYSVQL RNYDFENDYI ISPTADDNGN | |
| | YYNSNEIDID KTNLPNNGDA NGAFNIARKG LLLKDRIVNS NESKVDLKIK | |
| | NEDWINFIIS | |
| WP_021736722 | MTQFEGFTNL YQVSKTLRFE LIPQGKTLKH IQEQGFIEED KARNDHYKEL | (SEQ |
| (modified) | KPIIDRIYKT YADQCLQLVQ LDWENLSAAI DSYRKEKTEE TRNALIEEQA | ID NO: |
| CRISPR- | TYRNAIHDYF IGRTDNLTDA INKRHAEIYK GLFKAELFNG KVLKQLGTVT | 125 |
| associated | TTEHENALLR SFDKFTTYFS GFYENRKNVF SAEDISTAIP HRIVQDNFPK | |
| protein Cpf1, | FKENCHIFTR LITAVPSLRE HFENVKKAIG IFVSTSIEEV FSFPFYNQLL | |
| subtype | TQTQIDLYNQ LLGGISREAG TEKIKGLNEV LNLAIQKNDE TAHIIASLPH | |
| PREFRAN | RFIPLFKQIL SDRNTLSFIL EEFKSDEEVI QSFCKYKTLL RNENVLETAE | |
| [Acidaminococcus | ALFNELNSID LTHIFISHKK LETISSALCD HWDTLRNALY ERRISELTGK | |
| sp. BV3L6] | ITKSAKEKVQ RSLKHEDINL QEIISAAGKE LSEAFKQKTS EILSHAHAAL | |
| | DQPLPTTLKK QEEKEILKSQ LDSLLGLYHL LDWFAVDESN EVDPEFSARL | |
| | TGIKLEMEPS LSFYNKARNY ATKKPYSVEK FKLNFQMPTL ASGWDVNKEK | |
| | NNGAILFVKN GLYYLGIMPK QKGRYKALSF EPTEKTSEGF DKMYYDYFPD | |
| | AAKMIPKCST QLKAVTAHFQ THTTPILLSN NFIEPLEITK EIYDLNNPEK | |
| | EPKKFQTAYA KKTGDQKGYR EALCKWIDFT RDFLSKYTKT TSIDLSSLRP | |
| | SSQYKDLGEY YAELNPLLYH ISFQRIAEKE IMDAVETGKL YLFQIYNKDF | |
| | AKGHHGKPNL HTLYWTGLFS PENLAKTSIK LNGQAELFYR PKSRMKRMAH | |
| | RLGEKMLNKK LKDQKTPIPD TLYQELYDYV NHRLSHDLSD EARALLPNVI | |
| | TKEVSHEIIK DRRFTSDKFF FHVPITLNYQ AANSPSKFNQ RVNAYLKEHP | |
| | ETPIIGIDRG ERNLIYITVI DSTGKILEQR SLNTIQQFDY QKKLDNREKE | |
| | RVAARQAWSV VGTIKDLKQG YLSQVIHEIV DLMIHYQAVV VLENLNFGFK | |
| | SKRTGIAEKA VYQQFEKMLI DKLNCLVLKD YPAEKVGGVL NPYQLTDQFT | |
| | SFAKMGTQSG FLFYVPAPYT SKIDPLTGFV DPFVWKTIKN HESRKHFLEG | |
| | FDFLHYDVKT GDFILHFKMN RNLSFQRGLP GFMPAWDIVF EKNETQFDAK | |
| | GTPFIAGKRI VPVIENHRFT GRYRDLYPAN ELIALLEEKG IVFRDGSNIL | |
| | PKLLENDDSH AIDTMVALIR SVLQMRNSNA ATGEDYINSP VRDLNGVCFD | |
| | SRFQNPEWPM DADANGAYHI ALKGQLLLNH LKESKDLKLQ NGISNQDWLA | |
| | YIQELRN | |
| WP_004339290 | MSIYQEFVNK YSLSKTLRFE LIPQGKTLEN IKARGLILDD EKRAKDYKKA | (SEQ |
| (modified) | KQIIDKYHQF FIEEILSSVC ISEDLLQNYS DVYFKLKKSD DDNLQKDFKS | ID NO: |
| hypothetical | AKDTIKKQIS KYINDSEKFK NLFNQNLIDA KKGQESDLIL WLKQSKDNGI | 126) |
| protein | ELFKANSDIT DIDEALEIIK SFKGWTTYFK GFHENRKNVY SSNDIPTSII | |
| [Francisella | YRIVDDNLPK FLENKAKYES LKDKAPEAIN YEQIKKDLAE ELTFDIDYKT | |
| tularensis] | SEVNQRVFSL DEVFEIANFN NYLNQSGITK FNTIIGGKFV NGENTKRKGI | |
| | NEYINLYSQQ INDKTLKKYK MSVLFKQILS DTESKSFVID KLEDDSDWVT | |
| | TMQSFYEQIA AFKTVEEKSI KETLSLLFDD LKAQKLDLSK IYFKNDKSLT | |
| | DLSQQVFDDY SVIGTAVLEY ITQQVAPKNL DNPSKKEQDL IAKKTEKAKY | |
| | LSLETIKLAL EEFNKHRDID KQCRFEEILS NFAAIPMIFD EIAQNKDNLA | |
| | QISIKYQNQG KKDLLQASAE EDVKAIKDLL DQTNNLLHRL KIFHISQSED | |
| | KANILDKDEH FYLVFEECYF ELANIVPLYN KIRNYITQKP YSDEKFKLNF | |
| | ENSTLASGWD KNKESANTAI LFIKDDKYYL GIMDKKHNKI FSDKAIEENK | |
| | GEGYKKIVYK QIADASKDIQ NLMIIDGKTV CKKGRKDRNG VNRQLLSLKR | |
| | KHLPENIYRI KETKSYLKNE ARFSRKDLYD FIDYYKDRLD YYDFEFELKP | |
| | SNEYSDFNDF TNHIGSQGYK LTFENISQDY INSLVNEGKL YLFQIYSKDF | |
| | SAYSKGRPNL HTLYWKALFD ERNLQDVVYK LNGEAELFYR KQSIPKKITH | |
| | PAKETIANKN KDNPKKESVF EYDLIKDKRF TEDKFFFHCP ITINFKSSGA | |
| | NKFNDEINLL LKEKANDVHI LSIDRGERHL AYYTLVDGKG NIIKQDNFNI | |
| | IGNDRMKTNY HDKLAAIEKD RDSARKDWKK INNIKEMKEG YLSQVVHEIA | |
| | KLVIEYNAIV VFEDLNFGFK RGRFKVEKQV YQKLEKMLIE KLNYLVFKDN | |
| | EFDKTGGVLR AYQLTAPFET FKKMGKQTGI IYYVPAGFTS KICPVTGFVN | |
| | QLYPKYESVS KSQEFFSKFD KICYNLDKGY FEFSFDYKNF GDKAAKGKWT | |
| | IASFGSRLIN FRNSDKNHNW DTREVYPTKE LEKLLKDYSI EYGHGECIKA | |
| | AICGESDKKF FAKLTSVLNT ILQMRNSKTG TELDYLISPV ADVNGNFFDS | |
| | RQAPKNMPQD ADANGAYHIG LKGLMLLDRI KNNQEGKKLN LVIKNEEYFE | |
| | FVQNRNN | |
| WP_022501477 | MNKAADNYTG GNYDEFIALS KVQKTLRNEL KPTPFTAEHI KQRGIISEDE | (SEQ |
| type V CRISPR- | YRAQQSLELK KIADEYYRNY ITHKLNDINN LDFYNLFDAI EEKYKKNDKD | ID NO: |
| associated | NRDKLDLVEK SKRGEIAKML SADDNFKSMF EAKLITKLLP DYVERNYTGE | 127 |
| protein Cpf1 | DKEKALETLA LFKGFTTYFK GYFKTRKNMF SGEGGASSIC HRIVNVNASI | |
| [Eubacterium sp. | FYDNLKTFMR IQEKAGDEIA LIEEELTEKL DGWRLEHIFS RDYYNEVLAQ | |
| CAG: 76] | KGIDYYNQIC GDINKHMNLY CQQNKFKANI FKMMKIQKQI MGISEKAFEI | |
| | PPMYQNDEEV YASFNEFISR LEEVKLTDRL INILQNINIY NTAKIYINAR | |
| | YYTNVSSYVY GGWGVIDSAI ERYLYNTIAG KGQSKVKKIE NAKKDNKFMS | |
| | VKELDSIVAE YEPDYFNAPY IDDDDNAVKA FGGQGVLGYF NKMSELLADV | |
| | SLYTIDYNSD DSLIENKESA LRIKKQLDDI MSLYHWLQTF IIDEVVEKDN | |
| | AFYAELEDIC CELENVVTLY DRIRNYVTKK PYSTQKFKLN FASPTLAAGW | |
| | SRSKEFDNNA IILLRNNKYY IAIFNVNNKP DKQIIKGSEE QRLSTDYKKM | |
| | VYNLLPGPNK MLPKVFIKSD TGKRDYNPSS YILEGYEKNR HIKSSGNFDI | |
| | NYCHDLIDYY KACINKHPEW KNYGFKFKET NQYNDIGQFY KDVEKQGYSI | |
| | SWAYISEEDI NKLDEEGKIY LFEIYNKDLS AHSTGRDNLH TMYLKNIFSE | |
| | DNLKNICIEL NGEAELFYRK SSMKSNITHK KDTILVNKTY INETGVRVSL | |
| | SDEDYMKVYN YYNNNYVIDT ENDKNLIDII EKIGHRKSKI DIVKDKRYTE | |
| | DKYFLYLPIT INYGIEDENV NSKIIEYIAK QDNMNVIGID RGERNLIYIS | |
| | VIDNKGNIIE QKSFNLVNNY DYKNKLKNME KTRDNARKNW QEIGKIKDVK | |
| | SGYLSGVISK IARMVIDYNA IIVMEDLNKG FKRGRFKVER QVYQKFENML | |
| | ISKLNYLVFK ERKADENGGI LRGYQLTYIP KSIKNVGKQC GCIFYVPAAY | |
| | TSKIDPATGF INIFDFKKYS GSGINAKVKD KKEFLMSMNS IRYINECSEE | |
| | YEKIGHRELF AFSFDYNNFK TYNVSSPVNE WTAYTYGERI KKLYKDGRWL | |
| | RSEVLNLTEN LIKLMEQYNI EYKDGHDIRE DISHMDETRN ADFICSLFEE | |
| | LKYTVQLRNS KSEAEDENYD RLVSPILNSS NGFYDSSDYM ENENNTTHTM | |
| | PKDADANGAY CIALKGLYEI NKIKQNWSDD KKFKENELYI NVTEWLDYIQ | |
| | NRRFE | |
| WP_014550095 | MSIYQEFVNK YSLSKTLRFE LIPQGKTLEN IKARGLILDD EKRAKDYKKA | (SEQ |
| type V CRISPR- | KQIIDKYHQF FIEEILSSVC ISEDLLQNYS DVYFKLKKSD DDNLQKDFKS | ID NO: |
| associated | AKDTIKKQIS EYIKDSEKFK NLFNQNLIDA KKGQESDLIL WLKQSKDNGI | 128) |
| protein Cpf1 | ELFKANSDIT DIDEALEIIK SFKGWTTYFK GFHENRKNVY SSNDIPTSII | |
| [Francisella | YRIVDDNLPK FLENKAKYES LKDKAPEAIN YEQIKKDLAE ELTFDIDYKT | |
| tularensis] | SEVNQRVFSL DEVFEIANFN NYLNQSGITK FNTIIGGKFV NGENTKRKGI | |
| | NEYINLYSQQ INDKTLKKYK MSVLFKQILS DTESKSFVID KLEDDSDVVT | |
| | TMQSFYEQIA AFKTVEEKSI KETLSLLFDD LKAQKLDLSK IYFKNDKSLT | |
| | DLSQQVFDDY SVIGTAVLEY ITQQVAPKNL DNPSKKEQDL IAKKTEKAKY | |
| | LSLETIKLAL EEFNKHRDID KQCRFEEILA NFAAIPMIFD EIAQNKDNLA | |
| | QISIKYQNQG KKDLLQASAE DDVKAIKDLL DQTNNLLHRL KIFHISQSED | |
| | KANILDKDEH FYLVFEECYF ELANIVPLYN KIRNYITQKP YSDEKFKLNF | |
| | ENSTLANGWD KNKEPDNTAI LFIKDDKYYL GVMNKKNNKI FDDKAIKENK | |
| | GEGYKKIVYK LLPGANKMLP KVFFSAKSIK FYNPSEDILR IRNHSTHTKN | |
| | GNPQKGYEKF EFNIEDCRKF IDFYKESISK HPEWKDFGFR FSDTQRYNSI | |
| | DEFYREVENQ GYKLTFENIS ESYIDSVVNQ GKLYLFQIYN KDFSAYSKGR | |
| | PNLHTLYWKA LFDERNLQDV VYKLNGEAEL FYRKKSIPKK ITHPAKEAIA | |
| | NKNKDNPKKE SFFEYDLIKD KRFTEDKFFF HCPITINFKS SGANKFNDEI | |
| | NLLLKEKAND VHILSIDRGE RHLAYYTLVD GKGNIIKQDT FNIIGNDRMK | |
| | TNYHDKLAAI EKDRDSARKD WKKINNIKEM KEGYLSQVVH EIAKLVIEHN | |
| | AIVVFEDLNF GFKRGRFKVE KQVYQKLEKM LIEKLNYLVF KDNEFDKTGG | |
| | VLRAYQLTAP FETFKKMGKQ TGIIYYVPAG FTSKICPVTG FVNQLYPKYE | |
| | SVSKSQEFFS KFDKICYNLD KGYFEFSFDY KNFGDKAAKG KWTIASFGSR | |
| | LINFRNSDKN HNWDTREVYP TKELEKLLKD YSIEYGHGEC IKAAICGESD | |
| | KKFFAKLTSI LNTILQMRNS KTGTELDYLI SPVADVNGNF FDSRQAPKNM | |
| | PQDADANGAY HIGLKGLMLL DRIKNNQEGK KLNLVIKNEE YFEFVQNRNN | |
| WP_003034647 | MSIYQEFVNK YSLSKTLRFE LIPQGKTLEN IKARGLILDD EKRAKDYKKA | (SEQ |
| type V CRISPR- | KQIIDKYHQF FIEEILSSVC ISEDLLQNYS DVYFKLKKSD DDNLQKDFKS | ID NO: |
| associated | AKDTIKKQIS EYIKDSEKFK NLFNQNLIDA KKGQESDLIL WLKQSKDNGI | 129) |
| protein Cpf1 | ELFKANSDIT DIDEALEIIK SFKGWTTYFK GFHENRKNVY SSDDIPTSII | |
| [Francisella | YRIVDDNLPK FLENKAKYES LKDKAPEAIN YEQIKKDLAE ELTFDIDYKT | |
| tularensis] | SEVNQRVFSL DEVFEIANFN NYLNQSGITK FNTIIGGKFV NGENTKRKGI | |
| | NEYINLYSQQ INDKTLKKYK MSVLFKQILS DTESKSFVID KLEDDSDVVT | |
| | TMQSFYEQIA AFKTVEEKSI KETLSLLFDD LKAQKLDLSK IYFKNDKSLT | |
| | DLSQQVFDDY SVIGTAVLEY ITQQVAPKNL DNPSKKEQDL IAKKTEKAKY | |
| | LSLETIKLAL EEFNKHRDID KQCRFEEILA NFAAIPMIFD EIAQNKDNLA | |
| | QISLKYQNQG KKDLLQASAE EDVKAIKDLL DQTNNLLHRL KIFHISQSED | |
| | KANILDKDEH FYLVFEECYF ELANIVPLYN KIRNYITQKP YSDEKFKLNF | |
| | ENSTLANGWD KNKEPDNTAI LFIKDDKYYL GVMNKKNNKI FDDKAIKENK | |
| | GEGYKKIVYK LLPGANKMLP KVFFSAKSIK FYNPSEDILR IRNHSTHTKN | |
| | GNPQKGYEKF EFNIEDCRKF IDFYKESISK HPEWKDFGFR FSDTQRYNSI | |
| | DEFYREVENQ GYKLTFENIS ESYIDSVVNQ GKLYLFQIYN KDFSAYSKGR | |
| | PNLHTLYWKA LFDERNLQDV VYKLNGEAEL FYRKQSIPKK ITHPAKEAIA | |
| | NKNKDNPKKE SVFEYDLIKD KRFTEDKFFF HCPITINFKS SGANKFNDEI | |
| | NLLLKEKAND VHILSIDRGE RHLAYYTLVD GKGNIIKQDT FNIIGNDRMK | |
| | TNYHDKLAAI EKDRDSARKD WKKINNIKEM KEGYLSQVVH EIAKLVIEHN | |
| | AIVVFEDLNF GFKRGRFKVE KQVYQKLEKM LIEKLNYLVF KDNEFDKTGG | |
| | VLRAYQLTAP FETFKKMGKQ TGIIYYVPAG FTSKICPVTG FVNQLYPKYE | |
| | SVSKSQEFFS KFDKICYNLD KGYFEFSFDY KNFGDKAAKG KWTIASFGSR | |
| | LINFRNSDKN HNWDTREVYP TKELEKLLKD YSIEYGHGEC IKAAICGESD | |
| | KKFFAKLTSV LNTILQMRNS KTGTELDYLI SPVADVNGNF FDSRQAPKNM | |
| | PQDADANGAY HIGLKGLMLL DRIKNNQEGK KLNLVIKNEE YFEFVQNRNN | |
| WP_003040289.1 | MSIYQEFVNK YSLSKTLRFE LIPQGKTLEN IKARGLILDD EKRAKDYKKA | (SEQ |
| type V CRISPR- | KQIIDKYHQF FIEEILSSVC ISEDLLQNYS DVYFKLKKSD DDNLQKDFKS | ID NO: |
| associated | AKDTIKKQIS EYIKDSEKFK NLFNQNLIDA KKGQESDLIL WLKQSKDNGI | 130) |
| protein Cpf1 | ELFKANSDIT DIDEALEIIK SFKGWTTYFK GFHENRKNVY SSNDIPTSII | |
| [Francisella | YRIVDDNLPK FLENKAKYES LKDKAPEAIN YEQIKKDLAE ELTFDIDYKT | |
| tularensis subsp. | SEVNQRVFSL DEVFEIANFN NYLNQSGITK FNTIIGGKFV NGENTKRKGI | |
| novicida U112] | NEYINLYSQQ INDKTLKKYK MSVLFKQILS DTESKSFVID KLEDDSDVVT | |
| | TMQSFYEQIA AFKTVEEKSI KETLSLLFDD LKAQKLDLSK IYFKNDKSLT | |
| | DLSQQVFDDY SVIGTAVLEY ITQQIAPKNL DNPSKKEQEL IAKKTEKAKY | |
| | LSLETIKLAL EEFNKHRDID KQCRFEEILA NFAAIPMIFD EIAQNKDNLA | |
| | QISIKYQNQG KKDLLQASAE DDVKAIKDLL DQTNNLLHKL KIFHISQSED | |
| | KANILDKDEH FYLVFEECYF ELANIVPLYN KIRNYITQKP YSDEKFKLNF | |
| | ENSTLANGWD KNKEPDNTAI LFIKDDKYYL GVMNKKNNKI FDDKAIKENK | |
| | GEGYKKIVYK LLPGANKMLP KVFFSAKSIK FYNPSEDILR IRNHSTHTKN | |
| | GSPQKGYEKF EFNIEDCRKF IDFYKQSISK HPEWKDFGFR FSDTQRYNSI | |
| | DEFYREVENQ GYKLTFENIS ESYIDSVVNQ GKLYLFQIYN KDFSAYSKGR | |
| | PNLHTLYWKA LFDERNLQDV VYKLNGEAEL FYRKQSIPKK ITHPAKEAIA | |
| | NKNKDNPKKE SVFEYDLIKD KRFTEDKFFF HCPITINFKS SGANKFNDEI | |
| | NLLLKEKAND VHILSIDRGE RHLAYYTLVD GKGNIIKQDT FNIIGNDRMK | |
| | TNYHDKLAAI EKDRDSARKD WKKINNIKEM KEGYLSQVVH EIAKLVIEYN | |
| | AIVVFEDLNF GFKRGRFKVE KQVYQKLEKM LIEKLNYLVF KDNEFDKTGG | |
| | VLRAYQLTAP FETFKKMGKQ TGIIYYVPAG FTSKICPVTG FVNQLYPKYE | |
| | SVSKSQEFFS KFDKICYNLD KGYFEFSFDY KNFGDKAAKG KWTIASFGSR | |
| | LINFRNSDKN HNWDTREVYP TKELEKLLKD YSIEYGHGEC IKAAICGESD | |
| | KKFFAKLTSV LNTILQMRNS KTGTELDYLI SPVADVNGNF FDSRQAPKNM | |
| | PQDADANGAY HIGLKGLMLL GRIKNNQEGK KLNLVIKNEE YFEFVQNRNN | |
| KKQ38174 | MKSFDSFTNL YSLSKTLKFE MRPVGNTQKM LDNAGVFEKD KLIQKKYGKT | (SEQ |
| hypothetical | KPYFDRLHRE FIEEALTGVE LIGLDENFRT LVDWQKDKKN NVAMKAYENS | ID NO: |
| protein | LQRLRTEIGK IFNLKAEDWV KNKYPILGLK NKNTDILFEE AVFGILKARY | 131) |
| US54_C0016G0 | GEEKDTFIEV EEIDKTGKSK INQISIFDSW KGFTGYFKKF FETRKNFYKN | |
| 015 [Candidatus | DGTSTAIATR IIDQNLKRFI DNLSIVESVR QKVDLAETEK SFSISLSQFF | |
| Roizmanbacteria | SIDFYNKCLL QDGIDYYNKI IGGETLKNGE KLIGLNELIN QYRQNNKDQK | |
| bacterium | IPFFKLLDKQ ILSEKILFLD EIKNDTELIE ALSQFAKTAE EKTKIVKKLF | |
| GW2011_GWA2 | ADFVENNSKY DLAQIYISQE AFNTISNKWT SETETFAKYL FEAMKSGKLA | |
| 37_7] | KYEKKDNSYK FPDFIALSQM KSALLSISLE GHFWKEKYYK ISKFQEKTNW | |
| | EQFLAIFLYE FNSLFSDKIN TKDGETKQVG YYLFAKDLHN LILSEQIDIP | |
| | KDSKVTIKDF ADSVLTIYQM AKYFAVEKKR AWLAEYELDS FYTQPDTGYL | |
| | QFYDNAYEDI VQVYNKLRNY LTKKPYSEEK WKLNFENSTL ANGWDKNKES | |
| | DNSAVILQKG GKYYLGLITK GHNKIFDDRF QEKFIVGIEG GKYEKIVYKF | |
| | FPDQAKMFPK VCFSAKGLEF FRPSEEILRI YNNAEFKKGE TYSIDSMQKL | |
| | IDFYKDCLTK YEGWACYTFR HLKPTEEYQN NIGEFFRDVA EDGYRIDFQG | |
| | ISDQYIHEKN EKGELHLFEI HNKDWNLDKA RDGKSKTTQK NLHTLYFESL | |
| | FSNDNVVQNF PIKLNGQAEI FYRPKTEKDK LESKKDKKGN KVIDHKRYSE | |
| | NKIFFHVPLT LNRTKNDSYR FNAQINNFLA NNKDINIIGV DRGEKHLVYY | |
| | SVITQASDIL ESGSLNELNG VNYAEKLGKK AENREQARRD WQDVQGIKDL | |
| | KKGYISQVVR KLADLAIKHN AIIILEDLNM RFKQVRGGIE KSIYQQLEKA | |
| | LIDKLSFLVD KGEKNPEQAG HLLKAYQLSA PFETFQKMGK QTGIIFYTQA | |
| | SYTSKSDPVT GWRPHLYLKY FSAKKAKDDI AKFTKIEFVN DRFELTYDIK | |
| | DFQQAKEYPN KTVWKVCSNV ERFRWDKNLN QNKGGYTHYT NITENIQELF | |
| | TKYGIDITKD LLTQISTIDE KQNTSFFRDF IFYFNLICQI RNTDDSEIAK | |
| | KNGKDDFILS PVEPFFDSRK DNGNKLPENG DDNGAYNIAR KGIVILNKIS | |
| | QYSEKNENCE KMKWGDLYVS NIDWDNFVTQ ANARH | |
| WP_022097749 | MNGNRSIVYR EFVGVTPVAK TLRNELRPVG HTQEHIIQNG LIQEDELRQE | (SEQ |
| type V CRISPR- | KSTELKNIMD DYYREYIDKS LSGLTDLDFT LLFELMNSVQ SSLSKDNKKA | ID NO: |
| associated | LEKEHNKMRE QICTHLQSDS DYKNMFNAKL FKEILPDFIK NYNQYDVKDK | 132) |
| protein Cpf1 | AGKLETLALF NGFSTYFTDF FEKRKNVFTK EAVSTSIAYR IVHENSLIFL | |
| [Eubacterium | ANMTSYKKIS EKALDEIEVI EKNNQDKMGD WELNQIFNPD FYNMVLIQSG | |
| eligens CAG:72] | IDFYNEICGV VNAHMNLYCQ QTKNNYNLFK MRKLHKQILA YTSTSFEVPK | |
| | MFEDDMSVYN AVNAFIDETE KGNIIGKLKD IVNKYDELDE KRIYISKDFY | |
| | ETLSCFMSGN WNLITGCVEN FYDENIHAKG KSKEEKVKKA VKEDKYKSIN | |
| | DVNDLVEKYI DEKERNEFKN SNAKQYIREI SNIITDTETA HLEYDEHISL | |
| | IESEEKADEI KKRLDMYMNM YHWVKAFIVD EVLDRDEMFY SDIDDIYNIL | |
| | ENIVPLYNRV RNYVTQKPYT SKKIKLNFQS PTLANGWSQS KEFDNNAIIL | |
| | IRDNKYYLAI FNAKNKPDKK IIQGNSDKKN DNDYKKMVYN LLPGANKMLP | |
| | KVFLSKKGIE TFKPSDYIIS GYNAHKHIKT SENFDISFCR DLIDYFKNSI | |
| | EKHAEWRKYE FKFSATDSYN DISEFYREVE MQGYRIDWTY ISEADINKLD | |
| | EEGKIYLFQI YNKDFAENST GKENLHTMYF KNIFSEENLK NIVIKINGQA | |
| | ELFYRKASVK NPVKHKKDSV LVNKTYKNQL DNGDVVRIPI PDDIYNEIYK | |
| | MYNGYIKESD LSEAAKEYLD KVEVRTAQKD IVKDYRYTVD KYFIHTPITI | |
| | NYKVTARNNV NDMAVKYIAQ NDDIHVIGID RGERNLIYIS VIDSHGNIVK | |
| | QKSYNILNNY DYKKKLVEKE KTREYARKNW KSIGNIKELK EGYISGVVHE | |
| | IAMLMVEYNA IIAMEDLNYG FKRGRFKVER QVYQKFESML INKLNYFASK | |
| | GKSVDEPGGL LKGYQLTYVP DNIKNLGKQC GVIFYVPAAF TSKIDPSTGF | |
| | ISAFNFKSIS TNASRKQFFM QFDEIRYCAE KDMFSFGFDY NNFDTYNITM | |
| | GKTQWTVYTN GERLQSEFNN ARRTGKTKSI NLTETIKLLL EDNEINYADG | |
| | HDVRIDMEKM YEDKNSEFFA QLLSLYKLTV QMRNSYTEAE EQEKGISYDK | |
| | IISPVINDEG EFFDSDNYKE SDDKECKMPK DADANGAYCI ALKGLYEVLK | |
| | IKSEWTEDGF DRNCLKLPHA EWLDFIQNKR YE | |
| WP_021739647 | MIKKTIDTVL NVRPIFVGIQ HLYFYEGPCR FGEGDELMPE YDAMMNQEMN | (SEQ |
| hypothetical | AAYVNEVVQH ETEGVHIMDP IYVERDDWFR SPEAMYEKMA EDIDKVDFYL | ID NO: |
| protein | FHFGIGRGDI YLEFAERYKK PVGAAPGLCC DGIGNTAAVK NRGLEAYAFM | 133) |
| [Eubacterium | SWDEFDTWMR VLRVRKCLKN TRVLLAVRWD SNRSYSSYDN FINQSDVTNK | |
| ramulus] | WGIQFRHVNV HELLDQTHPV DPTTNPSTPG RKALNINDED MKEIEKITDE | |
| | LIANAEACTM EPDMVKKTIQ AYYTVQKLLD AYDCNAFTAP CPDLCSTRRF | |
| | SEEKFTLCMT HSLNDENGIS SACEYDINSV IGKVIMTNLS GKAPYMGNTN | |
| | AIVFDKEGHM IPFHKFNDNT IEDIADKTNL YMTFHSTPNR NLKGLKAEKE | |
| | RYRLAPFAYS GFGATIRYDF AQDIGQVITM IRISPDATKI FIAKGTISGG | |
| | AGYEMKNCDQ GVFFNVADKV DFYHKQQYFG NHTVLAYGDY VEELKMLAEA | |
| | LGIEAVIA | |
| gi\|800943167 | MKNFSNLYQV SKTVRFELKP IGNTLENIKN KSLLKNDSIR AESYQKMKKT | (SEQ |
| WP_045971446.1 | IDEFHKYFID LALNNKKLSY LNEYIALYTQ SAEAKKEDKF KADFKKVQDN | ID NO: |
| type V CRISPR- | LRKEIVSSFT EGEAKAIFSV LDKKELITIE LEKWKNENNL AVYLDESFKS | 134) |
| associated | FTTYFTGFHQ NRKNMYSAEA NSTAIAYRLI HENLPKFIEN SKAFEKSSQI | |
| protein Cpf1 | AELQPKIEKL YKEFEAYLNV NSISELFEID YFNEVLTQKG ITVYNNIIGG | |
| [Flavobacterium | RTATEGKQKI QGLNEIINLY NQTKPKNERL PKLKQLYKQI LSDRISLSFL | |
| sp. 316] | PDAFTEGKQV LKAVFEFYKI NLLSYKQDGV EESQNLLELI QQVVKNLGNQ | |
| | DVNKIYLKND TSLTTIAQQL FGDFSVFSAA LQYRYETVVN PKYTAEYQKA | |
| | NEAKQEKLDK EKIKFVKQDY FSIAFLQEVV ADYVKTLDEN LDWKQKYTPS | |
| | CIADYFTTHF IAKKENEADK TFNFIANIKA KYQCIQGILE QADDYEDELK | |
| | QDQKLIDNIK FFLDAILEVV HFIKPLHLKS ESITEKDNAF YDVFENYYEA | |
| | LNVVTPLYNM VRNYVTQKPY STEKIKLNFE NAQLLNGWDA NKEKDYLTTI | |
| | LKRDGNYFLA IMDKKHNKTF QQFTEDDENY EKIVYKLLPG VNKMLPKVFF | |
| | SNKNIAFFNP SKEILDNYKN NTHKKGATFN LKDCHALIDF FKDSLNKHED | |
| | WKYFDFQFSE TKTYQDLSGF YKEVEHQGYK INFKKVSVSQ IDTLIEEGKM | |
| | YLFQIYNKDF SPYAKGKPNM HTLYWKALFE TQNLENVIYK LNGQAEIFFR | |
| | KASIKKKNII THKAHQPIAA KNPLTPTAKN TFAYDLIKDK RYTVDKFQFH | |
| | VPITMNFKAT GNSYINQDVL AYLKDNPEVN IIGLDRGERH LVYLTLIDQK | |
| | GTILLQESLN VIQDEKTHTP YHTLLDNKEI ARDKARKNWG SIESIKELKE | |
| | GYISQVVHKI TKMMIEHNAI VVMEDLNFGF KRGRFKVEKQ IYQKLEKMLI | |
| | DKLNYLVLKD KQPHELGGLY NALQLTNKFE SFQKMGKQSG FLFYVPAWNT | |
| | SKIDPTTGFV NYFYTKYENV EKAKTFFSKF DSILYNKTKG YFEFVVKNYS | |
| | DFNPKAADTR QEWTICTHGE RIETKRQKEQ NNNFVSTTIQ LTEQFVNFFE | |
| | KVGLDLSKEL KTQLIAQNEK SFFEELFHLL KLTLQMRNSE SHTEIDYLIS | |
| | PVANEKGIFY DSRKATASLP IDADANGAYH IAKKGLWIME QINKTNSEDD | |
| | LKKVKLAISN REWLQYVQQV QKK | |
| WP_044110123. | MKQFTNLYQL SKTLRFELKP IGKTLEHINA NGFIDNDAHR AESYKKVKKL | (SEQ |
| 1 | IDDYHKDYIE NVLNNFKLNG EYLQAYFDLY SQDTKDKQFK DIQDKLRKSI | ID NO: |
| type V CRISPR- | ASALKGDDRY KTIDKKELIR QDMKTFLKKD TDKALLDEFY EFTTYFTGYH | 135) |
| associated | ENRKNMYSDE AKSTAIAYRL IHDNLPKFID NIAVFKKIAN TSVADNFSTI | |
| protein Cpf1 | YKNFEEYLNV NSIDEIFSLD YYNIVLTQTQ IEVYNSIIGG RTLEDDTKIQ | |
| [Prevotella | GINEFVNLYN QQLANKKDRL PKLKPLFKQI LSDRVQLSWL QEEFNTGADV | |
| brevis] | LNAVKEYCTS YFDNVEESVK VLLTGISDYD LSKIYITNDL ALTDVSQRMF | |
| | GEWSIIPNAI EQRLRSDNPK KTNEKEEKYS DRISKLKKLP KSYSLGYINE | |
| | CISELNGIDI ADYYATLGAI NTESKQEPSI PTSIQVHYNA LKPILDTDYP | |
| | REKNLSQDKL TVMQLKDLLD DFKALQHFIK PLLGNGDEAE KDEKFYGELM | |
| | QLWEVIDSIT PLYNKVRNYC TRKPFSTEKI KVNFENAQLL DGWDENKEST | |
| | NASIILRKNG MYYLGIMKKE YRNILTKPMP SDGDCYDKVV YKFFKDITTM | |
| | VPKCTTQMKS VKEHFSNSND DYTLFEKDKF IAPVVITKEI FDLNNVLYNG | |
| | VKKFQIGYLN NTGDSFGYNH AVEIWKSFCL KFLKAYKSTS IYDFSSIEKN | |
| | IGCYNDLNSF YGAVNLLLYN LTYRKVSVDY IHQLVDEDKM YLFMIYNKDF | |
| | STYSKGTPNM HTLYWKMLFD ESNLNDVVYK LNGQAEVFYR KKSITYQHPT | |
| | HPANKPIDNK NVNNPKKQSN FEYDLIKDKR YTVDKFMFHV PITLNFKGMG | |
| | NGDINMQVRE YIKTTDDLHF IGIDRGERHL LYICVINGKG EIVEQYSLNE | |
| | IVNNYKGTEY KTDYHTLLSE RDKKRKEERS SWQTIEGIKE LKSGYLSQVI | |
| | HKITQLMIKY NAIVLLEDLN MGFKRGRQKV ESSVYQQFEK ALIDKLNYLV | |
| | DKNKDANEIG GLLHAYQLTN DPKLPNKNSK QSGFLFYVPA WNTSKIDPVT | |
| | GFVNLLDTRY ENVAKAQAFF KKFDSIRYNK EYDRFEFKFD YSNFTAKAED | |
| | TRTQWTLCTY GTRIETFRNA EKNSNWDSRE IDLTTEWKTL FTQHNIPLNA | |
| | NLKEAILLQA NKNFYTDILH LMKLTLQMRN SVTGTDIDYM VSPVANECGE | |
| | FFDSRKVKEG LPVNADANGA YNIARKGLWL AQQIKNANDL SDVKLAITNK | |
| | EWLQFAQKKQ YLKD | |
| WP_036388671. | MLFQDFTHLY PLSKTMRFEL KPIGKTLEHI HAKNFLSQDE TMADMYQKVK | (SEQ |
| 1 | AILDDYHRDF IADMMGEVKL TKLAEFYDVY LKFRKNPKDD GLQKQLKDLQ | ID NO: |
| type V CRISPR- | AVLRKEIVKP IGNGGKYKAG YDRLFGAKLF KDGKELGDLA KFVIAQEGES | 136) |
| associated | SPKLAHLAHF EKFSTYFTGF HDNRKNMYSD EDKHTAITYR LIHENLPRFI | |
| protein Cpf1 | DNLQILATIK QKHSALYDQI INELTASGLD VSLASHLDGY HKLLTQEGIT | |
| [Moraxella | AYNTLLGGIS GEAGSRKIQG INELINSHHN QHCHKSERIA KLRPLHKQIL | |
| caprae] | SDGMGVSFLP SKFADDSEMC QAVNEFYRHY ADVFAKVQSL FDGFDDHQKD | |
| | GIYVEHKNLN ELSKQAFGDF ALLGRVLDGY YVDVVNPEFN ERFAKAKTDN | |
| | AKAKLTKEKD KFIKGVHSLA SLEQAIEHYT ARHDDESVQA GKLGQYFKHG | |
| | LAGVDNPIQK IHNNHSTIKG FLERERPAGE RALPKIKSGK NPEMTQLRQL | |
| | KELLDNALNV AHFAKLLTTK TTLDNQDGNF YGEFGALYDE LAKIPTLYNK | |
| | VRDYLSQKPF STEKYKLNFG NPTLLNGWDL NKEKDNFGII LQKDGCYYLA | |
| | LLDKAHKKVF DNAPNTGKNV YQKMIYKLLP GPNKMLPKVF FAKSNLDYYN | |
| | PSAELLDKYA QGTHKKGNNF NLKDCHALID FFKAGINKHP EWQHFGFKFS | |
| | PTSSYQDLSD FYREVEPQGY QVKFVDINAD YINELVEQGQ LYLFQIYNKD | |
| | FSPKAHGKPN LHTLYFKALF SKDNLANPIY KLNGEAQIFY RKASLDMNET | |
| | TIHRAGEVLE NKNPDNPKKR QFVYDIIKDK RYTQDKFMLH VPITMNFGVQ | |
| | GMTIKEFNKK VNQSIQQYDE VNVIGIDRGE RHLLYLTVIN SKGEILEQRS | |
| | LNDITTASAN GTQMTTPYHK ILDKREIERL NARVGWGEIE TIKELKSGYL | |
| | SHVVHQISQL MLKYNAIVVL EDLNFGFKRG RFKVEKQIYQ NFENALIKKL | |
| | NHLVLKDEAD DEIGSYKNAL QLTNNFTDLK SIGKQTGFLF YVPAWNTSKI | |
| | DPETGFVDLL KPRYENIAQS QAFFGKFDKI CYNADKDYFE FHIDYAKFTD | |
| | KAKNSRQIWK ICSHGDKRYV YDKTANQNKG ATKGINVNDE LKSLFARHHI | |
| | NDKQPNLVMD ICQNNDKEFH KSLIYLLKTL LALRYSNASS DEDFILSPVA | |
| | NDEGMFFNSA LADDTQPQNA DANGAYHIAL KGLWVLEQIK NSDDLNKVKL | |
| | AIDNQTWLNF AQNR | |
| WP_020988726. | MEDYSGFVNI YSIQKTLRFE LKPVGKTLEH IEKKGFLKKD KIRAEDYKAV | (SEQ |
| 1 | KKIIDKYHRA YIEEVFDSVL HQKKKKDKTR FSTQFIKEIK EFSELYYKTE | ID NO: |
| type V CRISPR- | KNIPDKERLE ALSEKLRKML VGAFKGEFSE EVAEKYKNLF SKELIRNEIE | 137) |
| associated | KFCETDEERK QVSNFKSFTT YFTGFHSNRQ NIYSDEKKST AIGYRIIHQN | |
| protein Cpf1 | LPKFLDNLKI IESIQRRFKD FPWSDLKKNL KKIDKNIKLT EYFSIDGFVN | |
| [Leptospira | VLNQKGIDAY NTILGGKSEE SGEKIQGLNE YINLYRQKNN IDRKNLPNVK | |
| inadai] | ILFKQILGDR ETKSFIPEAF PDDQSVLNSI TEFAKYLKLD KKKKSIIAEL | |
| | KKFLSSFNRY ELDGIYLAND NSLASISTFL FDDWSFIKKS VSFKYDESVG | |
| | DPKKKIKSPL KYEKEKEKWL KQKYYTISFL NDAIESYSKS QDEKRVKIRL | |
| | EAYFAEFKSK DDAKKQFDLL ERIEEAYAIV EPLLGAEYPR DRNLKADKKE | |
| | VGKIKDFLDS IKSLQFFLKP LLSAEIFDEK DLGFYNQLEG YYEEIDSIGH | |
| | LYNKVRNYLT GKIYSKEKFK LNFENSTLLK GWDENREVAN LCVIFREDQK | |
| | YYLGVMDKEN NTILSDIPKV KPNELFYEKM VYKLIPTPHM QLPRIIFSSD | |
| | NLSIYNPSKS ILKIREAKSF KEGKNFKLKD CHKFIDFYKE SISKNEDWSR | |
| | FDFKFSKTSS YENISEFYRE VERQGYNLDF KKVSKFYIDS LVEDGKLYLF | |
| | QIYNKDFSIF SKGKPNLHTI YFRSLFSKEN LKDVCLKLNG EAEMFFRKKS | |
| | INYDEKKKRE GHHPELFEKL KYPILKDKRY SEDKFQFHLP ISLNFKSKER | |
| | LNFNLKVNEF LKRNKDINII GIDRGERNLL YLVMINQKGE ILKQTLLDSM | |
| | QSGKGRPEIN YKEKLQEKEI ERDKARKSWG TVENIKELKE GYLSIVIHQI | |
| | SKLMVENNAI VVLEDLNIGF KRGRQKVERQ VYQKFEKMLI DKLNFLVFKE | |
| | NKPTEPGGVL KAYQLTDEFQ SFEKLSKQTG FLFYVPSWNT SKIDPRTGFI | |
| | DFLHPAYENI EKAKQWINKF DSIRFNSKMD WFEFTADTRK FSENLMLGKN | |
| | RVWVICTTNV ERYFTSKTAN SSIQYNSIQI TEKLKELFVD IPFSNGQDLK | |
| | PEILRKNDAV FFKSLLFYIK TTLSLRQNNG KKGEEEKDFI LSPVVDSKGR | |
| | FFNSLEASDD EPKDADANGA YHIALKGLMN LLVLNETKEE NLSRPKWKIK | |
| | NKDWLEFVWE RNR | |
| WP_023936172. | MPWIDLKDFT NLYPVSKTLR FELKPVGKTL ENIEKAGILK EDEHRAESYR | (SEQ |
| 1 | RVKKIIDTYH KVFIDSSLEN MAKMGIENEI KAMLQSFCEL YKKDHRTEGE | ID NO: |
| type V CRISPR- | DKALDKIRAV LRGLIVGAFT GVCGRRENTV QNEKYESLFK EKLIKEILPD | 138) |
| associated | FVLSTEAESL PFSVEEATRS LKEFDSFTSY FAGFYENRKN IYSTKPQSTA | |
| protein Cpf1 | IAYRLIHENL PKFIDNILVF QKIKEPIAKE LEHIRADFSA GGYIKKDERL | |
| [Porphyromonas | EDIFSLNYYI HVLSQAGIEK YNALIGKIVT EGDGEMKGLN EHINLYNQQR | |
| crevioricanis] | GREDRLPLFR PLYKQILSDR EQLSYLPESF EKDEELLRAL KEFYDHIAED | |
| | ILGRTQQLMT SISEYDLSRI YVRNDSQLTD ISKKMLGDWN AIYMARERAY | |
| | DHEQAPKRIT AKYERDRIKA LKGEESISLA NLNSCIAFLD NVRDCRVDTY | |
| | LSTLGQKEGP HGLSNLVENV FASYHEAEQL LSFPYPEENN LIQDKDNVVL | |
| | IKNLLDNISD LQRFLKPLWG MGDEPDKDER FYGEYNYIRG ALDQVIPLYN | |
| | KVRNYLTRKP YSTRKVKLNF GNSQLLSGWD RNKEKDNSCV ILRKGQNFYL | |
| | AIMNNRHKRS FENKVLPEYK EGEPYFEKMD YKFLPDPNKM LPKVFLSKKG | |
| | IEIYEPSPKL LEQYGHGTHK KGDTFSMDDL HELIDFFKHS IEAHEDWKQF | |
| | GFKFSDTATY ENVSSFYREV EDQGYKLSFR KVSESYVYSL IDQGKLYLFQ | |
| | IYNKDFSPCS KGTPNLHTLY WRMLFDERNL ADVIYKLDGK AEIFFREKSL | |
| | KNDHPTHPAG KPIKKKSRQK KGEESLFEYD LVKDRRYTMD KFQFHVPITM | |
| | NFKCSAGSKV NDMVNAHIRE AKDMHVIGID RGERNLLYIC VIDSRGTILD | |
| | QISLNTINDI DYHDLLESRD KDRQQERRNW QTIEGIKELK QGYLSQAVHR | |
| | IAELMVAYKA VVALEDLNMG FKRGRQKVES SVYQQFEKQL IDKLNYLVDK | |
| | KKRPEDIGGL LRAYQFTAPF KSFKEMGKQN GFLFYIPAWN TSNIDPTTGF | |
| | VNLFHAQYEN VDKAKSFFQK FDSISYNPKK DWFEFAFDYK NFTKKAEGSR | |
| | SMWILCTHGS RIKNFRNSQK NGQWDSEEFA LTEAFKSLFV RYEIDYTADL | |
| | KTAIVDEKQK DFFVDLLKLF KLTVQMRNSW KEKDLDYLIS PVAGADGRFF | |
| | DTREGNKSLP KDADANGAYN IALKGLWALR QIRQTSEGGK LKLAISNKEW | |
| | LQFVQERSYE KD | |
| WP_009217842. | MRKFNEFVGL YPISKTLRFE LKPIGKTLEH IQRNKLLEHD AVRADDYVKV | (SEQ |
| 1 | KKIIDKYHKC LIDEALSGFT FDTEADGRSN NSLSEYYLYY NLKKRNEQEQ | ID NO: |
| type V CRISPR- | KTFKTIQNNL RKQIVNKLTQ SEKYKRIDKK ELITTDLPDF LTNESEKELV | 139) |
| associated | EKFKNFTTYF TEFHKNRKNM YSKEEKSTAI AFRLINENLP KFVDNIAAFE | |
| protein Cpf1 | KVVSSPLAEK INALYEDFKE YLNVEEISRV FRLDYYDELL TQKQIDLYNA | |
| [Bacteroidetes | IVGGRTEEDN KIQIKGLNQY INEYNQQQTD RSNRLPKLKP LYKQILSDRE | |
| oral taxon 274] | SVSWLPPKFD SDKNLLIKIK ECYDALSEKE KVFDKLESIL KSLSTYDLSK | |
| | IYISNDSQLS YISQKMFGRW DIISKAIRED CAKRNPQKSR ESLEKFAERI | |
| | DKKLKTIDSI SIGDVDECLA QLGETYVKRV EDYFVAMGES EIDDEQTDTT | |
| | SFKKNIEGAY ESVKELLNNA DNITDNNLMQ DKGNVEKIKT LLDAIKDLQR | |
| | FIKPLLGKGD EADKDGVFYG EFTSLWTKLD QVTPLYNMVR NYLTSKPYST | |
| | KKIKLNFENS TLMDGWDLNK EPDNTTVIFC KDGLYYLGIM GKKYNRVFVD | |
| | REDLPHDGEC YDKMEYKLLP GANKMLPKVF FSETGIQRFL PSEELLGKYE | |
| | RGTHKKGAGF DLGDCRALID FFKKSIERHD DWKKFDFKFS DTSTYQDISE | |
| | FYREVEQQGY KMSFRKVSVD YIKSLVEEGK LYLFQIYNKD FSAHSKGTPN | |
| | MHTLYWKMLF DEENLKDVVY KLNGEAEVFF RKSSITVQSP THPANSPIKN | |
| | KNKDNQKKES KFEYDLIKDR RYTVDKFLFH VPITMNFKSV GGSNINQLVK | |
| | RHIRSATDLH IIGIDRGERH LLYLTVIDSR GNIKEQFSLN EIVNEYNGNT | |
| | YRTDYHELLD TREGERTEAR RNWQTIQNIR ELKEGYLSQV IHKISELAIK | |
| | YNAVIVLEDL NFGFMRSRQK VEKQVYQKFE KMLIDKLNYL VDKKKPVAET | |
| | GGLLRAYQLT GEFESFKTLG KQSGILFYVP AWNTSKIDPV TGFVNLFDTH | |
| | YENIEKAKVF FDKFKSIRYN SDKDWFEFVV DDYTRESPKA EGTRRDWTIC | |
| | TQGKRIQICR NHQRNNEWEG QEIDLTKAFK EHFEAYGVDI SKDLREQINT | |
| | QNKKEFFEEL LRLLRLTLQM RNSMPSSDID YLISPVANDT GCFFDSRKQA | |
| | ELKENAVLPM NADANGAYNI ARKGLLAIRK MKQEENDSAK ISLAISNKEW | |
| | LKFAQTKPYL ED | |
| WP_036890108. | MDSLKDFTNL YPVSKTLRFE LKPVGKTLEN IEKAGILKED EHRAESYRRV | (SEQ |
| 1 | KKIIDTYHKV FIDSSLENMA KMGIENEIKA MLQSFCELYK KDHRTEGEDK | ID NO: |
| type V CRISPR- | ALDKIRAVLR GLIVGAFTGV CGRRENTVQN EKYESLFKEK LIKEILPDFV | 140) |
| associated | LSTEAESLPF SVEEATRSLK EFDSFTSYFA GFYENRKNIY STKPQSTAIA | |
| protein Cpf1 | YRLIHENLPK FIDNILVFQK IKEPIAKELE HIRADFSAGG YIKKDERLED | |
| [Porphyromonas | IFSLNYYIHV LSQAGIEKYN ALIGKIVTEG DGEMKGLNEH INLYNQQRGR | |
| crevioricanis] | EDRLPLFRPL YKQILSDREQ LSYLPESFEK DEELLRALKE FYDHIAEDIL | |
| | GRTQQLMTSI SEYDLSRIYV RNDSQLTDIS KKMLGDWNAI YMARERAYDH | |
| | EQAPKRITAK YERDRIKALK GEESISLANL NSCIAFLDNV RDCRVDTYLS | |
| | TLGQKEGPHG LSNLVENVFA SYHEAEQLLS FPYPEENNLI QDKDNVVLIK | |
| | NLLDNISDLQ RFLKPLWGMG DEPDKDERFY GEYNYIRGAL DQVIPLYNKV | |
| | RNYLTRKPYS TRKVKLNFGN SQLLSGWDRN KEKDNSCVIL RKGQNFYLAI | |
| | MNNRHKRSFE NKMLPEYKEG EPYFEKMDYK FLPDPNKMLP KVFLSKKGIE | |
| | IYKPSPKLLE QYGHGTHKKG DTFSMDDLHE LIDFFKHSIE AHEDWKQFGF | |
| | KFSDTATYEN VSSFYREVED QGYKLSFRKV SESYVYSLID QGKLYLFQIY | |
| | NKDFSPCSKG TPNLHTLYWR MLFDERNLAD VIYKLDGKAE IFFREKSLKN | |
| | DHPTHPAGKP IKKKSRQKKG EESLFEYDLV KDRRYTMDKF QFHVPITMNF | |
| | KCSAGSKVND MVNAHIREAK DMHVIGIDRG ERNLLYICVI DSRGTILDQI | |
| | SLNTINDIDY HDLLESRDKD RQQEHRNWQT IEGIKELKQG YLSQAVHRIA | |
| | ELMVAYKAVV ALEDLNMGFK RGRQKVESSV YQQFEKQLID KLNYLVDKKK | |
| | RPEDIGGLLR AYQFTAPFKS FKEMGKQNGF LFYIPAWNTS NIDPTTGFVN | |
| | LFHVQYENVD KAKSFFQKFD SISYNPKKDW FEFAFDYKNF TKKAEGSRSM | |
| | WILCTHGSRI KNFRNSQKNG QWDSEEFALT EAFKSLFVRY EIDYTADLKT | |
| | AIVDEKQKDF FVDLLKLFKL TVQMRNSWKE KDLDYLISPV AGADGRFFDT | |
| | REGNKSLPKD ADANGAYNIA LKGLWALRQI RQTSEGGKLK LAISNKEWLQ | |
| | FVQERSYEKD | |
| WP_036887416. | MDSLKDFTNL YPVSKTLRFE LKPVGKTLEN IEKAGILKED EHRAESYRRV | (SEQ |
| 1 | KKIIDTYHKV FIDSSLENMA KMGIENEIKA MLQSFCELYK KDHRTEGEDK | ID NO: |
| type V CRISPR- | ALDKIRAVLR GLIVGAFTGV CGRRENTVQN EKYESLFKEK LIKEILPDFV | 141) |
| associated | LSTEAESLPF SVEEATRSLK EFDSFTSYFA GFYENRKNIY STKPQSTAIA | |
| protein Cpf1 | YRLIHENLPK FIDNILVFQK IKEPIAKELE HIRADFSAGG YIKKDERLED | |
| [Porphyromonas | IFSLNYYIHV LSQAGIEKYN ALIGKIVTEG DGEMKGLNEH INLYNQQRGR | |
| crevioricanis] | EDRLPLFRPL YKQILSDREQ LSYLPESFEK DEELLRALKE FYDHIAEDIL | |
| | GRTQQLMTSI SEYDLSRIYV RNDSQLTDIS KKMLGDWNAI YMARERAYDH | |
| | EQAPKRITAK YERDRIKALK GEESISLANL NSCIAFLDNV RDCRVDTYLS | |
| | TLGQKEGPHG LSNLVENVFA SYHEAEQLLS FPYPEENNLI QDKDNVVLIK | |
| | NLLDNISDLQ RFLKPLWGMG DEPDKDERFY GEYNYIRGAL DQVIPLYNKV | |
| | RNYLTRKPYS TRKVKLNFGN SQLLSGWDRN KEKDNSCVIL RKGQNFYLAI | |
| | MNNRHKRSFE NKVLPEYKEG EPYFEKMDYK FLPDPNKMLP KVFLSKKGIE | |
| | IYKPSPKLLE QYGHGTHKKG DTFSMDDLHE LIDFFKHSIE AHEDWKQFGF | |
| | KFSDTATYEN VSSFYREVED QGYKLSFRKV SESYVYSLID QGKLYLFQIY | |
| | NKDFSPCSKG TPNLHTLYWR MLFDERNLAD VIYKLDGKAE IFFREKSLKN | |
| | DHPTHPAGKP IKKKSRQKKG EESLFEYDLV KDRHYTMDKF QFHVPITMNF | |
| | KCSAGSKVND MVNAHIREAK DMHVIGIDRG ERNLLYICVI DSRGTILDQI | |
| | SLNTINDIDY HDLLESRDKD RQQERRNWQT IEGIKELKQG YLSQAVHRIA | |
| | ELMVAYKAVV ALEDLNMGFK RGRQKVESSV YQQFEKQLID KLNYLVDKKK | |
| | RPEDIGGLLR AYQFTAPFKS FKEMGKQNGF LFYIPAWNTS NIDPTTGFVN | |
| | LFHAQYENVD KAKSFFQKFD SISYNPKKDW FEFAFDYKNF TKKAEGSRSM | |
| | WILCTHGSRI KNFRNSQKNG QWDSEEFALT EAFKSLFVRY EIDYTADLKT | |
| | AIVDEKQKDF FVDLLKLFKL TVQMRNSWKE KDLDYLISPV AGADGRFFDT | |
| | REGNKSLPKD ADANGAYNIA LKGLWALRQI RQTSEGGKLK LAISNKEWLQ | |
| | FVQERSYEKD | |
| WP_023941260. | MDSLKDFTNL YPVSKTLRFE LKPVGKTLEN IEKAGILKED EHRAESYRRV | (SEQ |
| 1 | KKIIDTYHKV FIDSSLENMA KMGIENEIKA MLQSFCELYK KDHRTEGEDK | ID NO: |
| type V CRISPR- | ALDKIRAVLR GLIVGAFTGV CGRRENTVQN EKYESLFKEK LIKEILPDFV | 142) |
| associated | LSTEAESLPF SVEEATRSLK EFDSFTSYFA GFYENRKNIY STKPQSTAIA | |
| protein Cpf1 | YRLIHENLPK FIDNILVFQK IKEPIAKELE HIRADFSAGG YIKKDERLED | |
| [Porphyromonas | IFSLNYYIHV LSQAGIEKYN ALIGKIVTEG DGEMKGLNEH INLYNQQRGR | |
| crevioricanis] | EDRLPLFRPL YKQILSDREQ LSYLPESFEK DEELLRALKE FYDHIAEDIL | |
| | GRTQQLMTSI SEYDLSRIYV RNDSQLTDIS KKMLGDWNAI YMARERAYDH | |
| | EQAPKRITAK YERDRIKALK GEESISLANL NSCIAFLDNV RDCRVDTYLS | |
| | TLGQKEGPHG LSNLVENVFA SYHEAEQLLS FPYPEENNLI QDKDNVVLIK | |
| | NLLDNISDLQ RFLKPLWGMG DEPDKDERFY GEYNYIRGAL DQVIPLYNKV | |
| | RNYLTRKPYS TRKVKLNFGN SQLLSGWDRN KEKDNSCVIL RKGQNFYLAI | |
| | MNNRHKRSFE NKVLPEYKEG EPYFEKMDYK FLPDPNKMLP KVFLSKKGIE | |
| | IYKPSPKLLE QYGHGTHKKG DTFSMDDLHE LIDFFKHSIE AHEDWKQFGF | |
| | KFSDTATYEN VSSFYREVED QGYKLSFRKV SESYVYSLID QGKLYLFQIY | |
| | NKDFSPCSKG TPNLHTLYWR MLFDERNLAD VIYKLDGKAE IFFREKSLKN | |
| | DHPTHPAGKP IKKKSRQKKG EESLFEYDLV KDRRYTMDKF QFHVPITMNF | |
| | KCSAGSKVND MVNAHIREAK DMHVIGIDRG ERNLLYICVI DSRGTILDQI | |
| | SLNTINDIDY HDLLESRDKD RQQERRNWQT IEGIKELKQG YLSQAVHRIA | |
| | ELMVAYKAVV ALEDLNMGFK RGRQKVESSV YQQFEKQLID KLNYLVDKKK | |
| | RPEDIGGLLR AYQFTAPFKS FKEMGKQNGF LFYIPAWNTS NIDPTTGFVN | |
| | LFHAQYENVD KAKSFFQKFD SISYNPKKDW FEFAFDYKNF TKKAEGSRSM | |
| | WILCTHGSRI KNFRNSQKNG QWDSEEFALT EAFKSLFVRY EIDYTADLKT | |
| | AIVDEKQKDF FVDLLKLFKL TVQMRNSWKE KDLDYLISPV AGADGRFFDT | |
| | REGNKSLPKD ADANGAYNIA LKGLWALRQI RQTSEGGKLK LAISNKEWLQ | |
| | FVQERSYEKD | |
| WP_037975888. | MANSLKDFTN IYQLSKTLRF ELKPIGKTEE HINRKLIIMH DEKRGEDYKS | (SEQ |
| 1 | VTKLIDDYHR KFIHETLDPA HFDWNPLAEA LIQSGSKNNK ALPAEQKEMR | ID NO: |
| type V CRISPR- | EKIISMFTSQ AVYKKLFKKE LFSELLPEMI KSELVSDLEK QAQLDAVKSF | 143) |
| associated | DKFSTYFTGF HENRKNIYSK KDTSTSIAFR IVHQNFPKFL ANVRAYTLIK | |
| protein Cpf1 | ERAPEVIDKA QKELSGILGG KTLDDIFSIE SFNNVLTQDK IDYYNQIIGG | |
| [Synergistes | VSGKAGDKKL RGVNEFSNLY RQQHPEVASL RIKMVPLYKQ ILSDRTTLSF | |
| jonesii] | VPEALKDDEQ AINAVDGLRS ELERNDIFNR IKRLFGKNNL YSLDKIWIKN | |
| | SSISAFSNEL FKNWSFIEDA LKEFKENEFN GARSAGKKAE KWLKSKYFSF | |
| | ADIDAAVKSY SEQVSADISS APSASYFAKF TNLIETAAEN GRKFSYFAAE | |
| | SKAFRGDDGK TEIIKAYLDS LNDILHCLKP FETEDISDID TEFYSAFAEI | |
| | YDSVKDVIPV YNAVRNYTTQ KPFSTEKFKL NFENPALAKG WDKNKEQNNT | |
| | AIILMKDGKY YLGVIDKNNK LRADDLADDG SAYGYMKMNY KFIPTPHMEL | |
| | PKVFLPKRAP KRYNPSREIL LIKENKTFIK DKNFNRTDCH KLIDFFKDSI | |
| | NKHKDWRTFG FDFSDTDSYE DISDFYMEVQ DQGYKLTFTR LSAEKIDKWV | |
| | EEGRLFLFQI YNKDFADGAQ GSPNLHTLYW KAIFSEENLK DVVLKLNGEA | |
| | ELFFRRKSID KPAVHAKGSM KVNRRDIDGN PIDEGTYVEI CGYANGKRDM | |
| | ASLNAGARGL IESGLVRITE VKHELVKDKR YTIDKYFFHV PFTINFKAQG | |
| | QGNINSDVNL FLRNNKDVNI IGIDRGERNL VYVSLIDRDG HIKLQKDFNI | |
| | IGGMDYHAKL NQKEKERDTA RKSWKTIGTI KELKEGYLSQ VVHEIVRLAV | |
| | DNNAVIVMED LNIGFKRGRF KVEKQVYQKF EKMLIDKLNY LVFKDAGYDA | |
| | PCGILKGLQL TEKFESFTKL GKQCGIIFYI PAGYTSKIDP TTGFVNLFNI | |
| | NDVSSKEKQK DFIGKLDSIR FDAKRDMFTF EFDYDKFRTY QTSYRKKWAV | |
| | WTNGKRIVRE KDKDGKFRMN DRLLTEDMKN ILNKYALAYK AGEDILPDVI | |
| | SRDKSLASEI FYVFKNTLQM RNSKRDTGED FIISPVLNAK GRFFDSRKTD | |
| | AALPIDADAN GAYHIALKGS LVLDAIDEKL KEDGRIDYKD MAVSNPKWFE | |
| | FMQTRKFDF | |
| WP_081839471. | MENMANSLKD FTNIYQLSKT LRFELKPIGK TEEHINRKLI IMHDEKRGED | (SEQ |
| 1 | YKSVTKLIDD YHRKFIHETL DPAHFDWNPL AEALIQSGSK NNKALPAEQK | ID NO: |
| type V CRISPR- | EMREKIISMF TSQAVYKKLF KKELFSELLP EMIKSELVSD LEKQAQLDAV | 144) |
| associated | KSFDKFSTYF TGFHENRKNI YSKKDTSTSI AFRIVHQNFP KFLANVRAYT | |
| protein Cpf1 | LIKERAPEVI DKAQKELSGI LGGKTLDDIF SIESFNNVLT QDKIDYYNQI | |
| [Synergistes | IGGVSGKAGD KKLRGVNEFS NLYRQQHPEV ASLRIKMVPL YKQILSDRTT | |
| jonesii] | LSFVPEALKD DEQAINAVDG LRSELERNDI FNRIKRLFGK NNLYSLDKIW | |
| | IKNSSISAFS NELFKNWSFI EDALKEFKEN EFNGARSAGK KAEKWLKSKY | |
| | FSFADIDAAV KSYSEQVSAD ISSAPSASYF AKFTNLIETA AENGRKFSYF | |
| | AAESKAFRGD DGKTEIIKAY LDSLNDILHC LKPFETEDIS DIDTEFYSAF | |
| | AEIYDSVKDV IPVYNAVRNY TTQKPFSTEK FKLNFENPAL AKGWDKNKEQ | |
| | NNTAIILMKD GKYYLGVIDK NNKLRADDLA DDGSAYGYMK MNYKFIPTPH | |
| | MELPKVFLPK RAPKRYNPSR EILLIKENKT FIKDKNFNRT DCHKLIDFFK | |
| | DSINKHKDWR TFGFDFSDTD SYEDISDFYM EVQDQGYKLT FTRLSAEKID | |
| | KWVEEGRLFL FQIYNKDFAD GAQGSPNLHT LYWKAIFSEE NLKDVVLKLN | |
| | GEAELFFRRK SIDKPAVHAK GSMKVNRRDI DGNPIDEGTY VEICGYANGK | |
| | RDMASLNAGA RGLIESGLVR ITEVKHELVK DKRYTIDKYF FHVPFTINFK | |
| | AQGQGNINSD VNLFLRNNKD VNIIGIDRGE RNLVYVSLID RDGHIKLQKD | |
| | FNIIGGMDYH AKLNQKEKER DTARKSWKTI GTIKELKEGY LSQWVHEIVR | |
| | LAVDNNAVIV MEDLNIGFKR GRFKVEKQVY QKFEKMLIDK LNYLVFKDAG | |
| | YDAPCGILKG LQLTEKFESF TKLGKQCGII FYIPAGYTSK IDPTTGFVNL | |
| | FNINDVSSKE KQKDFIGKLD SIRFDAKRDM FTFEFDYDKF RTYQTSYRKK | |
| | WAVWTNGKRI VREKDKDGKF RMNDRLLTED MKNILNKYAL AYKAGEDILP | |
| | DVISRDKSLA SEIFYVFKNT LQMRNSKRDT GEDFIISPVL NAKGRFFDSR | |
| | KTDAALPIDA DANGAYHIAL KGSLVLDAID EKLKEDGRID YKDMAVSNPK | |
| | WFEFMQTRKF DF | |
| WP_006283774. | MQINNLKIIY MKFTDFTGLY SLSKTLRFEL KPIGKTLENI KKAGLLEQDQ | (SEQ |
| 1 | HRADSYKKVK KIIDEYHKAF IEKSLSNFEL KYQSEDKLDS LEEYLMYYSM | ID NO: |
| type V CRISPR- | KRIEKTEKDK FAKIQDNLRK QIADHLKGDE SYKTIFSKDL IRKNLPDFVK | 145) |
| associated | SDEERTLIKE FKDFTTYFKG FYENRENMYS AEDKSTAISH RIIHENLPKF | |
| protein Cpf1 | VDNINAFSKI ILIPELREKL NQIYQDFEEY LNVESIDEIF HLDYFSMVMT | |
| [Prevotella | QKQIEVYNAI IGGKSTNDKK IQGLNEYINL YNQKHKDCKL PKLKLLFKQI | |
| bryantii B14] | LSDRIAISWL PDNFKDDQEA LDSIDTCYKN LLNDGNVLGE GNLKLLLENI | |
| | DTYNLKGIFI RNDLQLTDIS QKMYASWNVI QDAVILDLKK QVSRKKKESA | |
| | EDYNDRLKKL YTSQESFSIQ YLNDCLRAYG KTENIQDYFA KLGAVNNEHE | |
| | QTINLFAQVR NAYTSVQAIL TTPYPENANL AQDKETVALI KNLLDSLKRL | |
| | QRFIKPLLGK GDESDKDERF YGDFTPLWET LNQITPLYNM VRNYMTRKPY | |
| | SQEKIKLNFE NSTLLGGWDL NKEHDNTAII LRKNGLYYLA IMKKSANKIF | |
| | DKDKLDNSGD CYEKMVYKLL PGANKMLPKV FFSKSRIDEF KPSENIIENY | |
| | KKGTHKKGAN FNLADCHNLI DFFKSSISKH EDWSKFNFHF SDTSSYEDLS | |
| | DFYREVEQQG YSISFCDVSV EYINKMVEKG DLYLFQIYNK DFSEFSKGTP | |
| | NMHTLYWNSL FSKENLNNII YKLNGQAEIF FRKKSLNYKR PTHPAHQAIK | |
| | NKNKCNEKKE SIFDYDLVKD KRYTVDKFQF HVPITMNFKS TGNTNINQQV | |
| | IDYLRTEDDT HIIGIDRGER HLLYLVVIDS HGKIVEQFTL NEIVNEYGGN | |
| | IYRTNYHDLL DTREQNREKA RESWQTIENI KELKEGYISQ VIHKITDLMQ | |
| | KYHAVVVLED LNMGFMRGRQ KVEKQVYQKF EEMLINKLNY LVNKKADQNS | |
| | AGGLLHAYQL TSKFESFQKL GKQSGFLFYI PAWNTSKIDP VTGFVNLFDT | |
| | RYESIDKAKA FFGKFDSIRY NADKDWFEFA FDYNNFTTKA EGTRTNWTIC | |
| | TYGSRIRTFR NQAKNSQWDN EEIDLTKAYK AFFAKHGINI YDNIKEAIAM | |
| | ETEKSFFEDL LHLLKLTLQM RNSITGTTTD YLISPVHDSK GNFYDSRICD | |
| | NSLPANADAN GAYNIARKGL MLIQQIKDST SSNRFKFSPI TNKDWLIFAQ | |
| | EKPYLND | |
| WP_024988992 | MNIKNFTGLY PLSKTLRFEL KPIGKTKENI EKNGILTKDE QRAKDYLIVK | (SEQ |
| type V CRISPR- | GFIDEYHKQF IKDRLWDFKL PLESEGEKNS LEEYQELYEL TKRNDAQEAD | ID NO: |
| associated | FTEIKDNLRS SITEQLTKSG SAYDRIFKKE FIREDLVNFL EDEKDKNIVK | 146) |
| protein Cpf1 | QFEDFTTYFT GFYENRKNMY SSEEKSTAIA YRLIHQNLPK FMDNMRSFAK | |
| [Prevotella | IANSSVSEHF SDIYESWKEY LNVNSIEEIF QLDYFSETLT QPHIEVYNYI | |
| albensis] | IGKKVLEDGT EIKGINEYVN LYNQQQKDKS KRLPFLVPLY KQILSDREKL | |
| | SWIAEEFDSD KKMLSAITES YNHLHNVLMG NENESLRNLL LNIKDYNLEK | |
| | INITNDLSLT EISQNLFGRY DVFTNGIKNK LRVLTPRKKK ETDENFEDRI | |
| | NKIFKTQKSF SIAFLNKLPQ PEMEDGKPRN IEDYFITQGA INTKSIQKED | |
| | IFAQIENAYE DAQVFLQIKD TDNKLSQNKT AVEKIKTLLD ALKELQHFIK | |
| | PLLGSGEENE KDELFYGSFL AIWDELDTIT PLYNKVRNWL TRKPYSTEKI | |
| | KLNFDNAQLL GGWDVNKEHD CAGILLRKND SYYLGIINKK TNHIFDTDIT | |
| | PSDGECYDKI DYKLLPGANK MLPKVFFSKS RIKEFEPSEA IINCYKKGTH | |
| | KKGKNFNLTD CHRLINFFKT SIEKHEDWSK FGFKFSDTET YEDISGFYRE | |
| | VEQQGYRLTS HPVSASYIHS LVKEGKLYLF QIWNKDFSQF SKGTPNLHTL | |
| | YWKMLFDKRN LSDVVYKLNG QAEVFYRKSS IEHQNRIIHP AQHPITNKNE | |
| | LNKKHTSTFK YDIIKDRRYT VDKFQFHVPI TINFKATGQN NINPIVQEVI | |
| | RQNGITHIIG IDRGERHLLY LSLIDLKGNI IKQMTLNEII NEYKGVTYKT | |
| | NYHNLLEKRE KERTEARHSW SSIESIKELK DGYMSQVIHK ITDMMVKYNA | |
| | IVVLEDLNGG FMRGRQKVEK QVYQKFEKKL IDKLNYLVDK KLDANEVGGV | |
| | LNAYQLTNKF ESFKKIGKQS GFLFYIPAWN TSKIDPITGF VNLFNTRYES | |
| | IKETKVFWSK FDIIRYNKEK NWFEFVFDYN TFTTKAEGTR TKWTLCTHGT | |
| | RIQTFRNPEK NAQWDNKEIN LTESFKALFE KYKIDITSNL KESIMQETEK | |
| | KFFQELHNLL HLTLQMRNSV TGTDIDYLIS PVADEDGNFY DSRINGKNFP | |
| | ENADANGAYN IARKGLMLIR QIKQADPQKK FKFETITNKD WLKFAQDKPY | |
| | LKD | |
| WP_039658684. | MQTLFENFTN QYPVSKTLRF ELIPQGKTKD FIEQKGLLKK DEDRAEKYKK | (SEQ |
| 1 | VKNIIDEYHK DFIEKSLNGL KLDGLEKYKT LYLKQEKDDK DKKAFDKEKE | ID NO: |
| type V CRISPR- | NLRKQIANAF RNNEKFKTLF AKELIKNDLM SFACEEDKKN VKEFEAFTTY | 147) |
| associated | FTGFHQNRAN MYVADEKRTA IASRLIHENL PKFIDNIKIF EKMKKEAPEL | |
| protein Cpf1 | LSPFNQTLKD MKDVIKGTTL EEIFSLDYFN KTLTQSGIDI YNSVIGGRTP | |
| [Smithella sp. | EEGKTKIKGL NEYINTDFNQ KQTDKKKRQP KFKQLYKQIL SDRQSLSFIA | |
| SC_K08D17] | EAFKNDTEIL EAIEKFYVNE LLHFSNEGKS TNVLDAIKNA VSNLESFNLT | |
| | KMYFRSGASL TDVSRKVFGE WSIINRALDN YYATTYPIKP REKSEKYEER | |
| | KEKWLKQDFN VSLIQTAIDE YDNETVKGKN SGKVIADYFA KFCDDKETDL | |
| | IQKVNEGYIA VKDLLNTPCP ENEKLGSNKD QVKQIKAFMD SIMDIMHFVR | |
| | PLSLKDTDKE KDETFYSLFT PLYDHLTQTI ALYNKVRNYL TQKPYSTEKI | |
| | KLNFENSTLL GGWDLNKETD NTAIILRKDN LYYLGIMDKR HNRIFRNVPK | |
| | ADKKDFCYEK MVYKLLPGAN KMLPKVFFSQ SRIQEFTPSA KLLENYANET | |
| | HKKGDNFNLN HCHKLIDFFK DSINKHEDWK NFDFRFSATS TYADLSGFYH | |
| | EVEHQGYKIS FQSVADSFID DLVNEGKLYL FQIYNKDFSP FSKGKPNLHT | |
| | LYWKMLFDEN NLKDVVYKLN GEAEVFYRKK SIAEKNTTIH KANESIINKN | |
| | PDNPKATSTF NYDIVKDKRY TIDKFQFHIP ITMNFKAEGI FNMNQRVNQF | |
| | LKANPDINII GIDRGERHLL YYALINQKGK ILKQDTLNVI ANEKQKVDYH | |
| | NLLDKKEGDR ATARQEWGVI ETIKELKEGY LSQVIHKLTD LMIENNAIIV | |
| | MEDLNFGFKR GRQKVEKQVY QKFEKMLIDK LNYLVDKNKK ANELGGLLNA | |
| | FQLANKFESF QKMGKQNGFI FYVPAWNTSK TDPATGFIDF LKPRYENLNQ | |
| | AKDFFEKFDS IRLNSKADYF EFAFDFKNFT EKADGGRTKW TVCTTNEDRY | |
| | AWNRALNNNR GSQEKYDITA ELKSLFDGKV DYKSGKDLKQ QIASQESADF | |
| | FKALMKNLSI TLSLRHNNGE KGDNEQDYIL SPVADSKGRF FDSRKADDDM | |
| | PKNADANGAY HIALKGLWCL EQISKTDDLK KVKLAISNKE WLEFVQTLKG | |
| WP_037385181 | MQTLFENFTN QYPVSKTLRF ELIPQGKTKD FIEQKGLLKK DEDRAEKYKK | (SEQ |
| type V CRISPR- | VKNIIDEYHK DFIEKSLNGL KLDGLEEYKT LYLKQEKDDK DKKAFDKEKE | ID NO: |
| associated | NLRKQIANAF RNNEKFKTLF AKELIKNDLM SFACEEDKKN VKEFEAFTTY | 148) |
| protein Cpf1 | FTGFHQNRAN MYVADEKRTA IASRLIHENL PKFIDNIKIF EKMKKEAPEL | |
| [Smithella sp. | LSPFNQTLKD MKDVIKGTTL EEIFSLDYFN KTLTQSGIDI YNSVIGGRTP | |
| SCADC] | EEGKTKIKGL NEYINTDFNQ KQTDKKKRQP KFKQLYKQIL SDRQSLSFIA | |
| | EAFKNDTEIL EAIEKFYVNE LLHFSNEGKS TNVLDAIKNA VSNLESFNLT | |
| | KIYFRSGTSL TDVSRKVFGE WSIINRALDN YYATTYPIKP REKSEKYEER | |
| | KEKWLKQDFN VSLIQTAIDE YDNETVKGKN SGKVIVDYFA KFCDDKETDL | |
| | IQKVNEGYIA VKDLLNTPYP ENEKLGSNKD QVKQIKAFMD SIMDIMHFVR | |
| | PLSLKDTDKE KDETFYSLFT PLYDHLTQTI ALYNKVRNYL TQKPYSTEKI | |
| | KLNFENSTLL GGWDLNKETD NTAIILRKEN LYYLGIMDKR HNRIFRNVPK | |
| | ADKKDSCYEK MVYKLLPGAN KMLPKVFFSQ SRIQEFTPSA KLLENYENET | |
| | HKKGDNFNLN HCHQLIDFFK DSINKHEDWK NFDFRFSATS TYADLSGFYH | |
| | EVEHQGYKIS FQSIADSFID DLVNEGKLYL FQIYNKDFSP FSKGKPNLHT | |
| | LYWKMLFDEN NLKDVVYKLN GEAEVFYRKK SIAEKNTTIH KANESIINKN | |
| | PDNPKATSTF NYDIVKDKRY TIDKFQFHVP ITMNFKAEGI FNMNQRVNQF | |
| | LKANPDINII GIDRGERHLL YYTLINQKGK ILKQDTLNVI ANEKQKVDYH | |
| | NLLDKKEGDR ATARQEWGVI ETIKELKEGY LSQVIHKLTD LMIENNAIIV | |
| | MEDLNFGFKR GRQKVEKQVY QKFEKMLIDK LNYLVDKNKK ANELGGLLNA | |
| | FQLANKFESF QKMGKQNGFI FYVPAWNTSK TDPATGFIDF LKPRYENLKQ | |
| | AKDFFEKFDS IRLNSKADYF EFAFDFKNFT GKADGGRTKW TVCTTNEDRY | |
| | AWNRALNNNR GSQEKYDITA ELKSLFDGKV DYKSGKDLKQ QIASQELADF | |
| | FRTLMKYLSV TLSLRHNNGE KGETEQDYIL SPVADSMGKF FDSRKAGDDM | |
| | PKNADANGAY HIALKGLWCL EQISKTDDLK KVKLAISNKE WLEFMQTLKG | |
| WP_039871282.1 | MKFTDFTGLY SLSKTLRFEL KPIGKTLENI KKAGLLEQDQ HRADSYKKVK | (SEQ |
| type V CRISPR- | KIIDEYHKAF IEKSLSNFEL KYQSEDKLDS LEEYLMYYSM KRIEKTEKDK | ID NO: |
| associated | FAKIQDNLRK QIADHLKGDE SYKTIFSKDL IRKNLPDFVK SDEERTLIKE | 149) |
| protein Cpf1 | FKDFTTYFKG FYENRENMYS AEDKSTAISH RIIHENLPKF VDNINAFSKI | |
| [Prevotella | ILIPELREKL NQIYQDFEEY LNVESIDEIF HLDYFSMVMT QKQIEVYNAI | |
| bryantii B14] | IGGKSTNDKK IQGLNEYINL YNQKHKDCKL PKLKLLFKQI LSDRIAISWL | |
| | PDNFKDDQEA LDSIDTCYKN LLNDGNVLGE GNLKLLLENI DTYNLKGIFI | |
| | RNDLQLTDIS QKMYASWNVI QDAVILDLKK QVSRKKKESA EDYNDRLKKL | |
| | YTSQESFSIQ YLNDCLRAYG KTENIQDYFA KLGAVNNEHE QTINLFAQVR | |
| | NAYTSVQAIL TTPYPENANL AQDKETVALI KNLLDSLKRL QRFIKPLLGK | |
| | GDESDKDERF YGDFTPLWET LNQITPLYNM VRNYMTRKPY SQEKIKLNFE | |
| | NSTLLGGWDL NKEHDNTAII LRKNGLYYLA IMKKSANKIF DKDKLDNSGD | |
| | CYEKMVYKLL PGANKMLPKV FFSKSRIDEF KPSENIIENY KKGTHKKGAN | |
| | FNLADCHNLI DFFKSSISKH EDWSKFNFHF SDTSSYEDLS DFYREVEQQG | |
| | YSISFCDVSV EYINKMVEKG DLYLFQIYNK DFSEFSKGTP NMHTLYWNSL | |
| | FSKENLNNII YKLNGQAEIF FRKKSLNYKR PTHPAHQAIK NKNKCNEKKE | |
| | SIFDYDLVKD KRYTVDKFQF HVPITMNFKS TGNTNINQQV IDYLRTEDDT | |
| | HIIGIDRGER HLLYLVVIDS HGKIVEQFTL NEIVNEYGGN IYRTNYHDLL | |
| | DTREQNREKA RESWQTIENI KELKEGYISQ VIHKITDLMQ KYHAVVVLED | |
| | LNMGFMRGRQ KVEKQVYQKF EEMLINKLNY LVNKKADQNS AGGLLHAYQL | |
| | TSKFESFQKL GKQSGFLFYI PAWNTSKIDP VTGFVNLFDT RYESIDKAKA | |
| | FFGKFDSIRY NADKDWFEFA FDYNNFTTKA EGTRTNWTIC TYGSRIRTFR | |
| | NQAKNSQWDN EEIDLTKAYK AFFAKHGINI YDNIKEAIAM ETEKSFFEDL | |
| | LHLLKLTLQM RNSITGTTTD YLISPVHDSK GNFYDSRICD NSLPANADAN | |
| | GAYNIARKGL MLIQQIKDST SSNRFKFSPI TNKDWLIFAQ EKPYLND | |
| EKE28449.1 | MFKGDAFTGL YEVQKTLRFE LVPIGLTQSY LENDWVIQKD KEVEENYGKI | (SEQ |
| hypothetical | KAYFDLIHKE FVRQSLENAW LCQLDDFYEK YIELHNSLET RKDKNLAKQF | ID NO: |
| protein | EKVMKSLKKE FVSFFDAKWN EWKQKFSFLK KWWIDVLNEK EVLDLMAEFY | 150) |
| ACD_3C00058G | PDEKELFDKF DKFFTYFSNF KESRKNFYAD DGRAWAIATR AIDENLITFI | |
| 0015 [uncultured | KNIEDFKKLN SSFREFVNDN FSEEDKQIFE IDFYNNCLLQ PWIDKYNKIV | |
| bacterium (gcode | WWYSLENWEK VQWLNEKINN FKQNQNKSNS KDLKFPRMKL LYKQILGDKE | |
| 4)] | KKVYIDEIRD DKNLIDLIDN SKRRNQIKID NANDIINDFI NNNAKFELDK | |
| | IYLTRQSINT ISSKYFSSWD YIRWYFWTGE LQEFVSFYDL KETFWKIEYE | |
| | TLENIFKDCY VKGINTESQN NIVFETQGIY ENFLNIFKFE FNQNISQISL | |
| | LEWELDKIQN EDIKKNEKQV EVIKNYFDSV MSVYKMTKYF SLEKWKKRVE | |
| | LDTDNNFYND FNEYLEGFEI WKDYNLVRNY ITKKQVNTDK IKLNFDNSQF | |
| | LTWWDKDKEN ERLGIILRRE WKYYLWILKK WNTLNFGDYL QKEWEIFYEK | |
| | MNYKQLNNVY RQLPRLLFPL TKKLNELKWD ELKKYLSKYI QNFWYNEEIA | |
| | QIKIEFDIFQ ESKEKWEKFD IDKLRKLIEY YKKWVLALYS DLYDLEFIKY | |
| | KNYDDLSIFY SDVEKKMYNL NFTKIDKSLI DGKVKSWELY LFQIYNKDFS | |
| | ESKKEWSTEN IHTKYFKLLF NEKNLQNLVV KLSWWADIFF RDKTENLKFK | |
| | KDKNGQEILD HRRFSQDKIM FHISITLNAN CWDKYWFNQY VNEYMNKERD | |
| | IKIIWIDRWE KHLAYYCVID KSWKIFNNEI WTLNELNWVN YLEKLEKIES | |
| | SRKDSRISWW EIENIKELKN GYISQVINKL TELIVKYNAI IVFEDLNIWF | |
| | KRWRQKIEKQ IYQKLELALA KKLNYLTQKD KKDDEILWNL KALQLVPKVN | |
| | DYQDIWNYKQ SWIMFYVRAN YTSVTCPNCW LRKNLYISNS ATKENQKKSL | |
| | NSIAIKYNDW KFSFSYEIDD KSWKQKQSLN KKKFIVYSDI ERFVYSPLEK | |
| | LTKVIDVNKK LLELFRDFNL SLDINKQIQE KDLDSVFFKS LTHLFNLILQ | |
| | LRNSDSKDNK DYISCPSCYY HSNNWLQWFE FNWDANWAYN IARKGIILLD | |
| | RIRKNQEKPD LYVSDIDWDN FVQSNQFPNT IIPIQNIEKQ VPLNIKI | |
| WP_018359861. | MKTQHFFEDF TSLYSLSKTI RFELKPIGKT LENIKKNGLI RRDEQRLDDY | (SEQ |
| 1 | EKLKKVIDEY HEDFIANILS SFSFSEEILQ SYIQNLSESE ARAKIEKTMR | ID NO: |
| type V CRISPR- | DTLAKAFSED ERYKSIFKKE LVKKDIPVWC PAYKSLCKKF DNFTTSLVPF | 151) |
| associated | HENRKNLYTS NEITASIPYR IVHVNLPKFI QNIEALCELQ KKMGADLYLE | |
| protein Cpf1 | MMENLRNVWP SFVKTPDDLC NLKTYNHLMV QSSISEYNRF VGGYSTEDGT | |
| [Porphyromonas | KHQGINEWIN IYRQRNKEMR LPGLVFLHKQ ILAKVDSSSF ISDTLENDDQ | |
| macacae] | VFCVLRQFRK LFWNTVSSKE DDAASLKDLF CGLSGYDPEA IYVSDAHLAT | |
| | ISKNIFDRWN YISDAIRRKT EVLMPRKKES VERYAEKISK QIKKRQSYSL | |
| | AELDDLLAHY SEESLPAGFS LLSYFTSLGG QKYLVSDGEV ILYEEGSNIW | |
| | DEVLIAFRDL QVILDKDFTE KKLGKDEEAV SVIKKALDSA LRLRKFFDLL | |
| | SGTGAEIRRD SSFYALYTDR MDKLKGLLKM YDKVRNYLTK KPYSIEKFKL | |
| | HFDNPSLLSG WDKNKELNNL SVIFRQNGYY YLGIMTPKGK NLFKTLPKLG | |
| | AEEMFYEKME YKQIAEPMLM LPKVFFPKKT KPAFAPDQSV VDIYNKKTFK | |
| | TGQKGFNKKD LYRLIDFYKE ALTVHEWKLF NFSFSPTEQY RNIGEFFDEV | |
| | REQAYKVSMV NVPASYIDEA VENGKLYLFQ IYNKDFSPYS KGIPNLHTLY | |
| | WKALFSEQNQ SRVYKLCGGG ELFYRKASLH MQDTTVHPKG ISIHKKNLNK | |
| | KGETSLFNYD LVKDKRFTED KFFFHVPISI NYKNKKITNV NQMVRDYIAQ | |
| | NDDLQIIGID RGERNLLYIS RIDTRGNLLE QFSLNVIESD KGDLRTDYQK | |
| | ILGDREQERL RRRQEWKSIE SIKDLKDGYM SQVVHKICNM VVEHKAIVVL | |
| | ENLNLSFMKG RKKVEKSVYE KFERMLVDKL NYLVVDKKNL SNEPGGLYAA | |
| | YQLTNPLFSF EELHRYPQSG ILFFVDPWNT SLTDPSTGFV NLLGRINYTN | |
| | VGDARKFFDR FNAIRYDGKG NILFDLDLSR FDVRVETQRK LWTLTTFGSR | |
| | IAKSKKSGKW MVERIENLSL CFLELFEQFN IGYRVEKDLK KAILSQDRKE | |
| | FYVRLIYLFN LMMQIRNSDG EEDYILSPAL NEKNLQFDSR LIEAKDLPVD | |
| | ADANGAYNVA RKGLMVVQRI KRGDHESIHR IGRAQWLRYV QEGIVE | |
| WP_013282991 | MLLYENYTKR NQITKSLRLE LRPQGKTLRN IKELNLLEQD KAIYALLERL | (SEQ |
| type V CRISPR- | KPVIDEGIKD IARDTLKNCE LSFEKLYEHF LSGDKKAYAK ESERLKKEIV | ID NO: |
| associated | KTLIKNLPEG IGKISEINSA KYLNGVLYDF IDKTHKDSEE KQNILSDILE | 152) |
| protein Cpf1 | TKGYLALFSK FLTSRITTLE QSMPKRVIEN FEIYAANIPK MQDALERGAV | |
| [Butyrivibrio | SFAIEYESIC SVDYYNQILS QEDIDSYNRL ISGIMDEDGA KEKGINQTIS | |
| proteoclasticus] | EKNIKIKSEH LEEKPFRILK QLHKQILEER EKAFTIDHID SDEEVVQVTK | |
| | EAFEQTKEQW ENIKKINGFY AKDPGDITLF IVVGPNQTHV LSQLIYGEHD | |
| | RIRLLLEEYE KNTLEVLPRR TKSEKARYDK FVNAVPKKVA KESHTFDGLQ | |
| | KMTGDDRLFI LYRDELARNY MRIKEAYGTF ERDILKSRRG IKGNRDVQES | |
| | LVSFYDELTK FRSALRIINS GNDEKADPIF YNTFDGIFEK ANRTYKAENL | |
| | CRNYVTKSPA DDARIMASCL GTPARLRTHW WNGEENFAIN DVAMIRRGDE | |
| | YYYFVLTPDV KPVDLKTKDE TDAQIFVQRK GAKSFLGLPK ALFKCILEPY | |
| | FESPEHKNDK NCVIEEYVSK PLTIDRRAYD IFKNGTFKKT NIGIDGLTEE | |
| | KFKDDCRYLI DVYKEFIAVY TRYSCFNMSG LKRADEYNDI GEFFSDVDTR | |
| | LCTMEWIPVS FERINDMVDK KEGLLFLVRS MFLYNRPRKP YERTFIQLFS | |
| | DSNMEHTSML LNSRAMIQYR AASLPRRVTH KKGSILVALR DSNGEHIPMH | |
| | IREAIYKMKN NFDISSEDFI MAKAYLAEHD VAIKKANEDI IRNRRYTEDK | |
| | FFLSLSYTKN ADISARTLDY INDKVEEDTQ DSRMAVIVTR NLKDLTYVAV | |
| | VDEKNNVLEE KSLNEIDGVN YRELLKERTK IKYHDKTRLW QYDVSSKGLK | |
| | EAYVELAVTQ ISKLATKYNA VVVVESMSST FKDKFSFLDE QIFKAFEARL | |
| | CARMSDLSFN TIKEGEAGSI SNPIQVSNNN GNSYQDGVIY FLNNAYTRTL | |
| | CPDTGFVDVF DKTRLITMQS KRQFFAKMKD IRIDDGEMLF TFNLEEYPTK | |
| | RLLDRKEWTV KIAGDGSYFD KDKGEYVYVN DIVREQIIPA LLEDKAVFDG | |
| | NMAEKFLDKT AISGKSVELI YKWFANALYG IITKKDGEKI YRSPITGTEI | |
| | DVSKNTTYNF GKKFMFKQEY RGDGDFLDAF LNYMQAQDIA V | |
| WP_048112740. | MNNYDEFTKL YPIQKTIRFE LKPQGRTMEH LETFNFFEED RDRAEKYKIL | (SEQ |
| 1 | KEAIDEYHKK FIDEHLTNMS LDWNSLKQIS EKYYKSREEK DKKVFLSEQK | ID NO: |
| type V CRISPR- | RMRQEIVSEF KKDDRFKDLF SKKLFSELLK EEIYKKGNHQ EIDALKSFDK | 153) |
| associated | FSGYFIGLHE NRKNMYSDGD EITAISNRIV NENFPKFLDN LQKYQEARKK | |
| protein Cpf1 | YPEWIIKAES ALVAHNIKMD EVFSLEYFNK VLNQEGIQRY NLALGGYVTK | |
| [Candidatus | SGEKMMGLND ALNLAHQSEK SSKGRIHMTP LFKQILSEKE SFSYIPDVFT | |
| Methanoplasma | EDSQLLPSIG GFFAQIENDK DGNIFDRALE LISSYAEYDT ERIYIRQADI | |
| termitum] | NRVSNVIFGE WGTLGGLMRE YKADSINDIN LERTCKKVDK WLDSKEFALS | |
| | DVLEAIKRTG NNDAFNEYIS KMRTAREKID AARKEMKFIS EKISGDEESI | |
| | HIIKTLLDSV QQFLHFFNLF KARQDIPLDG AFYAEFDEVH SKLFAIVPLY | |
| | NKVRNYLTKN NLNTKKIKLN FKNPTLANGW DQNKVYDYAS LIFLRDGNYY | |
| | LGIINPKRKK NIKFEQGSGN GPFYRKMVYK QIPGPNKNLP RVFLTSTKGK | |
| | KEYKPSKEII EGYEADKHIR GDKFDLDFCH KLIDFFKESI EKHKDWSKFN | |
| | FYFSPTESYG DISEFYLDVE KQGYRMHFEN ISAETIDEYV EKGDLFLFQI | |
| | YNKDFVKAAT GKKDMHTIYW NAAFSPENLQ DVVVKLNGEA ELFYRDKSDI | |
| | KEIVHREGEI LVNRTYNGRT PVPDKIHKKL TDYHNGRTKD LGEAKEYLDK | |
| | VRYFKAHYDI TKDRRYLNDK IYFHVPLTLN FKANGKKNLN KMVIEKFLSD | |
| | EKAHIIGIDR GERNLLYYSI IDRSGKIIDQ QSLNVIDGFD YREKLNQREI | |
| | EMKDARQSWN AIGKIKDLKE GYLSKAVHEI TKMAIQYNAI VVMEELNYGF | |
| | KRGRFKVEKQ IYQKFENMLI DKMNYLVFKD APDESPGGVL NAYQLTNPLE | |
| | SFAKLGKQTG ILFYVPAAYT SKIDPTTGFV NLFNTSSKTN AQERKEFLQK | |
| | FESISYSAKD GGIFAFAFDY RKFGTSKTDH KNVWTAYTNG ERMRYIKEKK | |
| | RNELFDPSKE IKEALTSSGI KYDGGQNILP DILRSNNNGL IYTMYSSFIA | |
| | AIQMRVYDGK EDYIISPIKN SKGEFFRTDP KRRELPIDAD ANGAYNIALR | |
| | GELTMRAIAE KFDPDSEKMA KLELKHKDWF EFMQTRGD | |
| WP_027407524. | MVAFIDEFVG QYPVSKTLRF EARPVPETKK WLESDQCSVL FNDQKRNEYY | (SEQ |
| 1 | GVLKELLDDY YRAYIEDALT SFTLDKALLE NAYDLYCNRD TNAFSSCCEK | ID NO: |
| type V CRISPR- | LRKDLVKAFG NLKDYLLGSD QLKDLVKLKA KVDAPAGKGK KKIEVDSRLI | 154) |
| associated | NWLNNNAKYS AEDREKYIKA IESFEGFVTY LTNYKQAREN MESSEDKSTA | |
| protein Cpf1 | IAFRVIDQNM VTYFGNIRIY EKIKAKYPEL YSALKGFEKF FSPTAYSEIL | |
| [Anaerovibrio sp. | SQSKIDEYNY QCIGRPIDDA DFKGVNSLIN EYRQKNGIKA RELPVMSMLY | |
| RM50] | KQILSDRDNS FMSEVINRNE EAIECAKNGY KVSYALFNEL LQLYKKIFTE | |
| | DNYGNIYVKT QPLTELSQAL FGDWSILRNA LDNGKYDKDI INLAELEKYF | |
| | SEYCKVLDAD DAAKIQDKFN LKDYFIQKNA LDATLPDLDK ITQYKPHLDA | |
| | MLQAIRKYKL FSMYNGRKKM DVPENGIDFS NEFNAIYDKL SEFSILYDRI | |
| | RNFATKKPYS DEKMKLSFNM PTMLAGWDYN NETANGCFLF IKDGKYFLGV | |
| | ADSKSKNIFD FKKNPHLLDK YSSKDIYYKV KYKQVSGSAK MLPKVVFAGS | |
| | NEKIFGHLIS KRILEIREKK LYTAAAGDRK AVAEWIDFMK SAIAIHPEWN | |
| | EYFKFKFKNT AEYDNANKFY EDIDKQTYSL EKVEIPTEYI DEMVSQHKLY | |
| | LFQLYTKDFS DKKKKKGTDN LHTMYWHGVF SDENLKAVTE GTQPIIKLNG | |
| | EAEMFMRNPS IEFQVTHEHN KPIANKNPLN TKKESVFNYD LIKDKRYTER | |
| | KFYFHCPITL NFRADKPIKY NEKINRFVEN NPDVCIIGID RGERHLLYYT | |
| | VINQTGDILE QGSLNKISGS YTNDKGEKVN KETDYHDLLD RKEKGKHVAQ | |
| | QAWETIENIK ELKAGYLSQV VYKLTQLMLQ YNAVIVLENL NVGFKRGRTK | |
| | VEKQVYQKFE KAMIDKLNYL VFKDRGYEMN GSYAKGLQLT DKFESFDKIG | |
| | KQTGCIYYVI PSYTSHIDPK TGFVNLLNAK LRYENITKAQ DTIRKFDSIS | |
| | YNAKADYFEF AFDYRSFGVD MARNEWVVCT CGDLRWEYSA KTRETKAYSV | |
| | TDRLKELFKA HGIDYVGGEN LVSHITEVAD KHELSTLLFY LRLVLKMRYT | |
| | VSGTENENDF ILSPVEYAPG KFFDSREATS TEPMNADANG AYHIALKGLM | |
| | TIRGIEDGKL HNYGKGGENA AWFKFMQNQE YKNNG | |
| WP_044910712. | MDYGNGQFER RAPLTKTITL RLKPIGETRE TIREQKLLEQ DAAFRKLVET | (SEQ |
| 1 | VTPIVDDCIR KIADNALCHF GTEYDFSCLG NAISKNDSKA IKKETEKVEK | ID NO: |
| type V CRISPR- | LLAKVLTENL PDGLRKVNDI NSAAFIQDTL TSFVQDDADK RVLIQELKGK | 155) |
| associated | TVLMQRFLTT RITALTVWLP DRVFENFNIF IENAEKMRIL LDSPLNEKIM | |
| protein Cpf1 | KFDPDAEQYA SLEFYGQCLS QKDIDSYNLI ISGIYADDEV KNPGINEIVK | |
| [Lachnospiraceae | EYNQQIRGDK DESPLPKLKK LHKQILMPVE KAFFVRVLSN DSDARSILEK | |
| bacterium | ILKDTEMLPS KIIEAMKEAD AGDIAVYGSR LHELSHVIYG DHGKLSQIIY | |
| MC2017] | DKESKRISEL METLSPKERK ESKKRLEGLE EHIRKSTYTF DELNRYAEKN | |
| | VMAAYIAAVE ESCAEIMRKE KDLRTLLSKE DVKIRGNRHN TLIVKNYFNA | |
| | WTVFRNLIRI LRRKSEAEID SDFYDVLDDS VEVLSLTYKG ENLCRSYITK | |
| | KIGSDLKPEI ATYGSALRPN SRWWSPGEKF NVKFHTIVRR DGRLYYFILP | |
| | KGAKPVELED MDGDIECLQM RKIPNPTIFL PKLVFKDPEA FFRDNPEADE | |
| | FVFLSGMKAP VTITRETYEA YRYKLYTVGK LRDGEVSEEE YKRALLQVLT | |
| | AYKEFLENRM IYADLNFGFK DLEEYKDSSE FIKQVETHNT FMCWAKVSSS | |
| | QLDDLVKSGN GLLFEIWSER LESYYKYGNE KVLRGYEGVL LSILKDENLV | |
| | SMRTLLNSRP MLVYRPKESS KPMVVHRDGS RVVDRFDKDG KYIPPEVHDE | |
| | LYRFFNNLLI KEKLGEKARK ILDNKKVKVK VLESERVKWS KFYDEQFAVT | |
| | FSVKKNADCL DTTKDLNAEV MEQYSESNRL ILIRNTTDIL YYLVLDKNGK | |
| | VLKQRSLNII NDGARDVDWK ERFRQVTKDR NEGYNEWDYS RTSNDLKEVY | |
| | LNYALKEIAE AVIEYNAILI IEKMSNAFKD KYSFLDDVTF KGFETKLLAK | |
| | LSDLHFRGIK DGEPCSFTNP LQLCQNDSNK ILQDGVIFMV PNSMTRSLDP | |
| | DTGFIFAIND HNIRTKKAKL NFLSKFDQLK VSSEGCLIMK YSGDSLPTHN | |
| | TDNRVWNCCC NHPITNYDRE TKKVEFIEEP VEELSRVLEE NGIETDTELN | |
| | KLNERENVPG KVVDAIYSLV LNYLRGTVSG VAGQRAVYYS PVTGKKYDIS | |
| | FIQAMNLNRK CDYYRIGSKE RGEWTDFVAQ LIN | |
| WP_081834226 | MTMDYGNGQF ERRAPLTKTI TLRLKPIGET RETIREQKLL EQDAAFRKLV | (SEQ |
| type V CRISPR- | ETVTPIVDDC IRKIADNALC HFGTEYDFSC LGNAISKNDS KAIKKETEKV | ID NO: |
| associated | EKLLAKVLTE NLPDGLRKVN DINSAAFIQD TLTSFVQDDA DKRVLIQELK | 156) |
| protein Cpf1 | GKTVLMQRFL TTRITALTVW LPDRVFENFN IFIENAEKMR ILLDSPLNEK | |
| [Lachnospiracea | IMKFDPDAEQ YASLEFYGQC LSQKDIDSYN LIISGIYADD EVKNPGINEI | |
| e bacterium | VKEYNQQIRG DKDESPLPKL KKLHKQILMP VEKAFFVRVL SNDSDARSIL | |
| MC2017]. | EKILKDTEML PSKIIEAMKE ADAGDIAVYG SRLHELSHVI YGDHGKLSQI | |
| | IYDKESKRIS ELMETLSPKE RKESKKRLEG LEEHIRKSTY TFDELNRYAE | |
| | KNVMAAYIAA VEESCAEIMR KEKDLRTLLS KEDVKIRGNR HNTLIVKNYF | |
| | NAWTVFRNLI RILRRKSEAE IDSDFYDVLD DSVEVLSLTY KGENLCRSYI | |
| | TKKIGSDLKP EIATYGSALR PNSRWWSPGE KFNVKFHTIV RRDGRLYYFI | |
| | LPKGAKPVEL EDMDGDIECL QMRKIPNPTI FLPKLVFKDP EAFFRDNPEA | |
| | DEFVFLSGMK APVTITRETY EAYRYKLYTV GKLRDGEVSE EEYKRALLQV | |
| | LTAYKEFLEN RMIYADLNFG FKDLEEYKDS SEFIKQVETH NTFMCWAKVS | |
| | SSQLDDLVKS GNGLLFEIWS ERLESYYKYG NEKVLRGYEG VLLSILKDEN | |
| | LVSMRTLLNS RPMLVYRPKE SSKPMVVHRD GSRVVDRFDK DGKYIPPEVH | |
| | DELYRFFNNL LIKEKLGEKA RKILDNKKVK VKVLESERVK WSKFYDEQFA | |
| | VTFSVKKNAD CLDTTKDLNA EVMEQYSESN RLILIRNTTD ILYYLVLDKN | |
| | GKVLKQRSLN IINDGARDVD WKERFRQVTK DRNEGYNEWD YSRTSNDLKE | |
| | VYLNYALKEI AEAVIEYNAI LIIEKMSNAF KDKYSFLDDV TFKGFETKLL | |
| | AKLSDLHFRG IKDGEPCSFT NPLQLCQNDS NKILQDGVIF MVPNSMTRSL | |
| | DPDTGFIFAI NDHNIRTKKA KLNFLSKFDQ LKVSSEGCLI MKYSGDSLPT | |
| | HNTDNRVWNC CCNHPITNYD RETKKVEFIE EPVEELSRVL EENGIETDTE | |
| | LNKLNERENV PGKVVDAIYS LVLNYLRGTV SGVAGQRAVY YSPVTGKKYD | |
| | ISFIQAMNLN RKCDYYRIGS KERGEWTDFV AQLIN | |
| WP_027216152.1 | MYYESLTKLY PIKKTIRNEL VPIGKTLENI KKNNILEADE DRKIAYIRVK | (SEQ |
| type V CRISPR- | AIMDDYHKRL INEALSGFAL IDLDKAANLY LSRSKSADDI ESFSRFQDKL | ID NO: |
| associated | RKAIAKRLRE HENFGKIGNK DIIPLLQKLS ENEDDYNALE SFKNFYTYFE | 157) |
| protein Cpf1 | SYNDVRLNLY SDKEKSSTVA YRLINENLPR FLDNIRAYDA VQKAGITSEE | |
| [Butyrivibrio | LSSEAQDGLF LVNTFNNVLI QDGINTYNED IGKLNVAINL YNQKNASVQG | |
| fibrisolvens] | FRKVPKMKVL YKQILSDREE SFIDEFESDT ELLDSLESHY ANLAKYFGSN | |
| | KVQLLFTALR ESKGVNVYVK NDIAKTSFSN VVFGSWSRID ELINGEYDDN | |
| | NNRKKDEKYY DKRQKELKKN KSYTIEKIIT LSTEDVDVIG KYIEKLESDI | |
| | DDIRFKGKNF YEAVLCGHDR SKKLSKNKGA VEAIKGYLDS VKDFERDLKL | |
| | INGSGQELEK NLVVYGEQEA VLSELSGIDS LYNMTRNYLT KKPFSTEKIK | |
| | LNFNKPTFLD GWDYGNEEAY LGFFMIKEGN YFLAVMDANW NKEFRNIPSV | |
| | DKSDCYKKVI YKQISSPEKS IQNLMVIDGK TVKKNGRKEK EGIHSGENLI | |
| | LEELKNTYLP KKINDIRKRR SYLNGDTFSK KDLTEFIGYY KQRVIEYYNG | |
| | YSFYFKSDDD YASFKEFQED VGRQAYQISY VDVPVSFVDD LINSGKLYLF | |
| | RVYNKDFSEY SKGRLNLHTL YFKMLFDERN LKNVVYKLNG QAEVFYRPSS | |
| | IKKEELIVHR AGEEIKNKNP KRAAQKPTRR LDYDIVKDRR YSQDKFMLHT | |
| | SIIMNFGAEE NVSFNDIVNG VLRNEDKVNV IGIDRGERNL LYVWVIDPEG | |
| | KILEQRSLNC ITDSNLDIET DYHRLLDEKE SDRKIARRDW TTIENIKELK | |
| | AGYLSQWVHI VAELVLKYNA IICLEDLNFG FKRGRQKVEK QVYQKFEKML | |
| | IDKLNYLVMD KSREQLSPEK ISGALNALQL TPDFKSFKVL GKQTGIIYYV | |
| | PAYLTSKIDP MTGFANLFYV KYENVDKAKE FFSKFDSIKY NKDGKNWNTK | |
| | GYFEFAFDYK KFTDRAYGRV SEWTVCTVGE RIIKFKNKEK NNSYDDKVID | |
| | LTNSLKELFD SYKVTYESEV DLKDAILAID DPAFYRDLTR RLQQTLQMRN | |
| | SSCDGSRDYI ISPVKNSKGE FFCSDNNDDT TPNDADANGA FNIARKGLWV | |
| | LNEIRNSEEG SKINLAMSNA QWLEYAQDNT I | |
| WP_016301126. | MHENNGKIAD NFIGIYPVSK TLRFELKPVG KTQEYIEKHG ILDEDLKRAG | (SEQ |
| 1 | DYKSVKKIID AYHKYFIDEA LNGIQLDGLK NYYELYEKKR DNNEEKEFQK | ID NO: |
| type V CRISPR- | IQMSLRKQIV KRFSEHPQYK YLFKKELIKN VLPEFTKDNA EEQTLVKSFQ | 158) |
| associated | EFTTYFEGFH QNRKNMYSDE EKSTAIAYRV VHQNLPKYID NMRIFSMILN | |
| protein Cpf1 | TDIRSDLTEL FNNLKTKMDI TIVEEYFAID GFNKVVNQKG IDVYNTILGA | |
| [Lachnospiraceae | FSTDDNTKIK GLNEYINLYN QKNKAKLPKL KPLFKQILSD RDKISFIPEQ | |
| bacterium | FDSDTEVLEA VDMFYNRLLQ FVIENEGQIT ISKLLTNFSA YDLNKIYVKN | |
| COE1] | DTTISAISND LFDDWSYISK AVRENYDSEN VDKNKRAAAY EEKKEKALSK | |
| | IKMYSIEELN FFVKKYSCNE CHIEGYFERR ILEILDKMRY AYESCKILHD | |
| | KGLINNISLC QDRQAISELK DFLDSIKEVQ WLLKPLMIGQ EQADKEEAFY | |
| | TELLRIWEEL EPITLLYNKV RNYVTKKPYT LEKVKLNFYK STLLDGWDKN | |
| | KEKDNLGIIL LKDGQYYLGI MNRRNNKIAD DAPLAKTDNV YRKMEYKLLT | |
| | KVSANLPRIF LKDKYNPSEE MLEKYEKGTH LKGENFCIDD CRELIDFFKK | |
| | GIKQYEDWGQ FDFKFSDTES YDDISAFYKE VEHQGYKITF RDIDETYIDS | |
| | LVNEGKLYLF QIYNKDFSPY SKGTKNLHTL YWEMLFSQQN LQNIVYKLNG | |
| | NAEIFYRKAS INQKDVVVHK ADLPIKNKDP QNSKKESMFD YDIIKDKRFT | |
| | CDKYQFHVPI TMNFKALGEN HFNRKVNRLI HDAENMHIIG IDRGERNLIY | |
| | LCMIDMKGNI VKQISLNEII SYDKNKLEHK RNYHQLLKTR EDENKSARQS | |
| | WQTIHTIKEL KEGYLSQVIH VITDLMVEYN AIVVLEDLNF GFKQGRQKFE | |
| | RQVYQKFEKM LIDKLNYLVD KSKGMDEDGG LLHAYQLTDE FKSFKQLGKQ | |
| | SGFLYYIPAW NTSKLDPTTG FVNLFYTKYE SVEKSKEFIN NFTSILYNQE | |
| | REYFEFLFDY SAFTSKAEGS RLKWTVCSKG ERVETYRNPK KNNEWDTQKI | |
| | DLTFELKKLF NDYSISLLDG DLREQMGKID KADFYKKFMK LFALIVQMRN | |
| | SDEREDKLIS PVLNKYGAFF ETGKNERMPL DADANGAYNI ARKGLWIIEK | |
| | IKNTDVEQLD KVKLTISNKE WLQYAQEHIL | |
| WP_035635841. | MSKLEKFTNC YSLSKTLRFK AIPVGKTQEN IDNKRLLVED EKRAEDYKGV | (SEQ |
| 1 | KKLLDRYYLS FINDVLHSIK LKNLNNYISL FRKKTRTEKE NKELENLEIN | ID NO: |
| type V CRISPR- | LRKEIAKAFK GNEGYKSLFK KDIIETILPE FLDDKDEIAL VNSFNGFTTA | 159) |
| associated | FTGFFDNREN MFSEEAKSTS IAFRCINENL TRYISNMDIF EKVDAIFDKH | |
| protein Cpf1 | EVQEIKEKIL NSDYDVEDFF EGEFFNFVLT QEGIDVYNAI IGGFVTESGE | |
| [Lachnospiraceae | KIKGLNEYIN LYNQKTKQKL PKFKPLYKQV LSDRESLSFY GEGYTSDEEV | |
| bacterium | LEVFRNTLNK NSEIFSSIKK LEKLFKNFDE YSSAGIFVKN GPAISTISKD | |
| ND2006] | IFGEWNVIRD KWNAEYDDIH LKKKAVVTEK YEDDRRKSFK KIGSFSLEQL | |
| | QEYADADLSV VEKLKEIIIQ KVDEIYKVYG SSEKLFDADF VLEKSLKKND | |
| | AVVAIMKDLL DSVKSFENYI KAFFGEGKET NRDESFYGDF VLAYDILLKV | |
| | DHIYDAIRNY VTQKPYSKDK FKLYFQNPQF MGGWDKDKET DYRATILRYG | |
| | SKYYLAIMDK KYAKCLQKID KDDVNGNYEK INYKLLPGPN KMLPKVFFSK | |
| | KWMAYYNPSE DIQKIYKNGT FKKGDMFNLN DCHKLIDFFK DSISRYPKWS | |
| | NAYDFNFSET EKYKDIAGFY REVEEQGYKV SFESASKKEV DKLVEEGKLY | |
| | MFQIYNKDFS DKSHGTPNLH TMYFKLLFDE NNHGQIRLSG GAELFMRRAS | |
| | LKKEELVVHP ANSPIANKNP DNPKKTTTLS YDVYKDKRFS EDQYELHIPI | |
| | AINKCPKNIF KINTEVRVLL KHDDNPYVIG IDRGERNLLY IVVVDGKGNI | |
| | VEQYSLNEII NNFNGIRIKT DYHSLLDKKE KERFEARQNW TSIENIKELK | |
| | AGYISQWVHK ICELVEKYDA VIALEDLNSG FKNSRVKVEK QVYQKFEKML | |
| | IDKLNYMVDK KSNPCATGGA LKGYQITNKF ESFKSMSTQN GFIFYIPAWL | |
| | TSKIDPSTGF VNLLKTKYTS IADSKKFISS FDRIMYVPEE DLFEFALDYK | |
| | NFSRTDADYI KKWKLYSYGN RIRIFRNPKK NNVFDWEEVC LTSAYKELFN | |
| | KYGINYQQGD IRALLCEQSD KAFYSSFMAL MSLMLQMRNS ITGRTDVDFL | |
| | ISPVKNSDGI FYDSRNYEAQ ENAILPKNAD ANGAYNIARK VLWAIGQFKK | |
| | AEDEKLDKVK IAISNKEWLE YAQTSVKH | |
| WP_051666128. | MLKNVGIDRL DVEKGRKNMS KLEKFTNCYS LSKTLRFKAI PVGKTQENID | (SEQ |
| 1 | NKRLLVEDEK RAEDYKGVKK LLDRYYLSFI NDVLHSIKLK NLNNYISLFR | ID NO: |
| type V CRISPR- | KKTRTEKENK ELENLEINLR KEIAKAFKGN EGYKSLFKKD IIETILPEFL | 160) |
| associated | DDKDEIALVN SFNGFTTAFT GFFDNRENMF SEEAKSTSIA FRCINENLTR | |
| protein Cpf1 | YISNMDIFEK VDAIFDKHEV QEIKEKILNS DYDVEDFFEG EFFNFVLTQE | |
| [Lachnospiraceae | GIDVYNAIIG GFVTESGEKI KGLNEYINLY NQKTKQKLPK FKPLYKQVLS | |
| bacterium | DRESLSFYGE GYTSDEEVLE VFRNTLNKNS EIFSSIKKLE KLFKNFDEYS | |
| ND2006] | SAGIFVKNGP AISTISKDIF GEWNVIRDKW NAEYDDIHLK KKAVVTEKYE | |
| | DDRRKSFKKI GSFSLEQLQE YADADLSVVE KLKEIIIQKV DEIYKVYGSS | |
| | EKLFDADFVL EKSLKKNDAV VAIMKDLLDS VKSFENYIKA FFGEGKETNR | |
| | DESFYGDFVL AYDILLKVDH IYDAIRNYVT QKPYSKDKFK LYFQNPQFMG | |
| | GWDKDKETDY RATILRYGSK YYLAIMDKKY AKCLQKIDKD DVNGNYEKIN | |
| | YKLLPGPNKM LPKVFFSKKW MAYYNPSEDI QKIYKNGTFK KGDMFNLNDC | |
| | HKLIDFFKDS ISRYPKWSNA YDFNFSETEK YKDIAGFYRE VEEQGYKVSF | |
| | ESASKKEVDK LVEEGKLYMF QIYNKDFSDK SHGTPNLHTM YFKLLFDENN | |
| | HGQIRLSGGA ELFMRRASLK KEELVVHPAN SPIANKNPDN PKKTTTLSYD | |
| | VYKDKRFSED QYELHIPIAI NKCPKNIFKI NTEVRVLLKH DDNPYVIGID | |
| | RGERNLLYIV VVDGKGNIVE QYSLNEIINN FNGIRIKTDY HSLLDKKEKE | |
| | RFEARQNWTS IENIKELKAG YISQVVHKIC ELVEKYDAVI ALEDLNSGFK | |
| | NSRVKVEKQV YQKFEKMLID KLNYMVDKKS NPCATGGALK GYQITNKFES | |
| | FKSMSTQNGF IFYIPAWLTS KIDPSTGFVN LLKTKYTSIA DSKKFISSFD | |
| | RIMYVPEEDL FEFALDYKNF SRTDADYIKK WKLYSYGNRI RIFRNPKKNN | |
| | VFDWEEVCLT SAYKELFNKY GINYQQGDIR ALLCEQSDKA FYSSFMALMS | |
| | LMLQMRNSIT GRTDVDFLIS PVKNSDGIFY DSRNYEAQEN AILPKNADAN | |
| | GAYNIARKVL WAIGQFKKAE DEKLDKVKIA ISNKEWLEYA QTSVKH | |
| WP_015504779. | MDAKEFTGQY PLSKTLRFEL RPIGRTWDNL EASGYLAEDR HRAECYPRAK | (SEQ |
| 1 | ELLDDNHRAF LNRVLPQIDM DWHPIAEAFC KVHKNPGNKE LAQDYNLQLS | ID NO: |
| type V CRISPR- | KRRKEISAYL QDADGYKGLF AKPALDEAMK IAKENGNESD IEVLEAFNGF | 161) |
| associated | SVYFTGYHES RENIYSDEDM VSVAYRITED NFPRFVSNAL IFDKLNESHP | |
| protein Cpf1 | DIISEVSGNL GVDDIGKYFD VSNYNNFLSQ AGIDDYNHII GGHTTEDGLI | |
| [Candidatus | QAFNVVLNLR HQKDPGFEKI QFKQLYKQIL SVRTSKSYIP KQFDNSKEMV | |
| Methanomethylophilus | DCICDYVSKI EKSETVERAL KLVRNISSFD LRGIFVNKKN LRILSNKLIG | |
| alvus] | DWDAIETALM HSSSSENDKK SVYDSAEAFT LDDIFSSVKK FSDASAEDIG | |
| | NRAEDICRVI SETAPFINDL RAVDLDSLND DGYEAAVSKI RESLEPYMDL | |
| | FHELEIFSVG DEFPKCAAFY SELEEVSEQL IEIIPLFNKA RSFCTRKRYS | |
| | TDKIKVNLKF PTLADGWDLN KERDNKAAIL RKDGKYYLAI LDMKKDLSSI | |
| | RTSDEDESSF EKMEYKLLPS PVKMLPKIFV KSKAAKEKYG LTDRMLECYD | |
| | KGMHKSGSAF DLGFCHELID YYKRCIAEYP GWDVFDFKFR ETSDYGSMKE | |
| | FNEDVAGAGY YMSLRKIPCS EVYRLLDEKS IYLFQIYNKD YSENAHGNKN | |
| | MHTMYWEGLF SPQNLESPVF KLSGGAELFF RKSSIPNDAK TVHPKGSVLV | |
| | PRNDVNGRRI PDSIYRELTR YFNRGDCRIS DEAKSYLDKV KTKKADHDIV | |
| | KDRRFTVDKM MFHVPIAMNF KAISKPNLNK KVIDGIIDDQ DLKIIGIDRG | |
| | ERNLIYVTMV DRKGNILYQD SLNILNGYDY RKALDVREYD NKEARRNWTK | |
| | VEGIRKMKEG YLSLAVSKLA DMIIENNAII VMEDLNHGFK AGRSKIEKQV | |
| | YQKFESMLIN KLGYMVLKDK SIDQSGGALH GYQLANHVTT LASVGKQCGV | |
| | IFYIPAAFTS KIDPTTGFAD LFALSNVKNV ASMREFFSKM KSVIYDKAEG | |
| | KFAFTFDYLD YNVKSECGRT LWTVYTVGER FTYSRVNREY VRKVPTDIIY | |
| | DALQKAGISV EGDLRDRIAE SDGDTLKSIF YAFKYALDMR VENREEDYIQ | |
| | SPVKNASGEF FCSKNAGKSL PQDSDANGAY NIALKGILQL RMLSEQYDPN | |
| | AESIRLPLIT NKAWLTFMQS GMKTWKN | |
| WP_044910713. | MGLYDGFVNR YSVSKTLRFE LIPQGRTREY IETNGILSDD EERAKDYKTI | (SEQ |
| 1 | KRLIDEYHKD YISRCLKNVN ISCLEEYYHL YNSSNRDKRH EELDALSDQM | ID NO: |
| type V CRISPR- | RGEIASFLTG NDEYKEQKSR DIIINERIIN FASTDEELAA VKRFRKFTSY | 162) |
| associated | FTGFFTNREN MYSAEKKSTA IAHRIIDVNL PKYVDNIKAF NTAIEAGVFD | (SEQ |
| protein Cpf1 | IAEFESNFKA ITDEHEVSDL LDITKYSRFI RNEDIIIYNT LLGGISMKDE | |
| [Lachnospiraceae | KIQGLNELIN LHNQKHPGKK VPLLKVLYKQ ILGDSQTHSF VDDQFEDDQQ | |
| bacterium | VINAVKAVTD TFSETLLGSL KIIINNIGHY DLDRIYIKAG QDITTLSKRA | |
| MC2017] | LNDWHIITEC LESEYDDKFP KNKKSDTYEE MRNRYVKSFK SFSIGRLNSL | |
| | VTTYTEQACF LENYLGSFGG DTDKNCLTDF TNSLMEVEHL LNSEYPVTNR | |
| | LITDYESVRI LKRLLDSEME VIHFLKPLLG NGNESDKDLV FYGEFEAEYE | |
| | KLLPVIKVYN RVRNYLTRKP FSTEKIKLNF NSPTLLCGWS QSKEKEYMGV | |
| | ILRKDGQYYL GIMTPSNKKI FSEAPKPDED CYEKMVLRYI PHPYQMLPKV | |
| | FFSKSNIAFF NPSDEILRIK KQESFKKGKS FNRDDCHKFI DFYKDSINRH | |
| | EEWRKFNFKF SDTDSYEDIS RFYKEVENQA FSMSFTKIPT VYIDSLVDEG | |
| | KLYLFKLHNK DFSEHSKGKP NLHTVYWNAL FSEYNLQNTV YQLNGSAEIF | |
| | FRKASIPENE RVIHKKNVPI TRKVAELNGK KEVSVFPYDI IKNRRYTVDK | |
| | FQFHVPLKMN FKADEKKRIN DDVIEAIRSN KGIHVIGIDR GERNLLYLSL | |
| | INEEGRIIEQ RSLNIIDSGE GHTQNYRDLL DSREKDREKA RENWQEIQEI | |
| | KDLKTGYLSQ AIHTITKWMK EYNAIIVLED LNDRFTNGRK KVEKQVYQKF | |
| | EKMLIDKLNY YVDKDEEFDR MGGTHRALQL TEKFESFQKL GRQTGFIFYV | |
| | PAWNTSKLDP TTGFVDLLYP KYKSVDATKD FIKKFDFIRF NSEKNYFEFG | |
| | LHYSNFTERA IGCRDEWILC SYGNRIVNFR NAAKNNSWDY KEIDITKQLL | |
| | DLFEKNGIDV KQENLIDSIC EMKDKPFFKS LIANIKLILQ IRNSASGTDI | |
| | DYMISPAMND RGEFFDTRKG LQQLPLDADA NGAYNIAKKG LWIVDQIRNT | |
| | TGNNVKMAMS NREWMHFAQE SRLA | |
| KKQ36153.1 | MKNVFGGFTN LYSLTKTLRF ELKPTSKTQK LMKRNNVIQT DEEIDKLYHD | ID NO: |
| hypothetical | EMKPILDEIH RRFINDALAQ KIFISASLDN FLKVVKNYKV ESAKKNIKQN | 163) |
| protein | QVKLLQKEIT IKTLGLRREV VSGFITVSKK WKDKYVGLGI KLKGDGYKVL | |
| US52_C0007G0 | TEQAVLDILK IEFPNKAKYI DKFRGFWTYF SGFNENRKNY YSEEDKATSI | |
| 008 [candidate | ANRIVNENLS RYIDNIIAFE EILQKIPNLK KFKQDLDITS YNYYLNQAGI | |
| division WS6 | DKYNKIIGGY IVDKDKKIQG INEKVNLYTQ QTKKKLPKLK FLFKQIGSER | |
| bacterium | KGFGIFEIKE GKEWEQLGDL FKLQRTKINS NGREKGLFDS LRTMYREFFD | |
| GW2011_GWA2 | EIKRDSNSQA RYSLDKIYFN KASVNTISNS WFTNWNKFAE LLNIKEDKKN | |
| 37_6] | GEKKIPEQIS IEDIKDSLSI IPKENLEELF KLTNREKHDR TRFFGSNAWV | |
| | TFLNIWQNEI EESFNKLEEK EKDFKKNAAI KFQKNNLVQK NYIKEVCDRM | |
| | LAIERMAKYH LPKDSNLSRE EDFYWIIDNL SEQREIYKYY NAFRNYISKK | |
| | PYNKSKMKLN FENGNLLGGW SDGQERNKAG VILRNGNKYY LGVLINRGIF | |
| | RTDKINNEIY RTGSSKWERL ILSNLKFQTL AGKGFLGKHG VSYGNMNPEK | |
| | SVPSLQKFIR ENYLKKYPQL TEVSNTKFLS KKDFDAAIKE ALKECFTMNF | |
| | INIAENKLLE AEDKGDLYLF EITNKDFSGK KSGKDNIHTI YWKYLFSESN | |
| | CKSPIIGLNG GAEIFFREGQ KDKLHTKLDK KGKKVFDAKR YSEDKLFFHV | |
| | SITINYGKPK NIKFRDIINQ LITSMNVNII GIDRGEKHLL YYSVIDSNGI | |
| | ILKQGSLNKI RVGDKEVDFN KKLTERANEM KKARQSWEQI GNIKNFKEGY | |
| | LSQAIHEIYQ LMIKYNAIIV LEDLNTEFKA KRLSKVEKSV YKKFELKLAR | |
| | KLNHLILKDR NTNEIGGVLK AYQLTPTIGG GDVSKFEKAK QWGMMFYVRA | |
| | NYTSTTDPVT GWRKHLYISN FSNNSVIKSF FDPTNRDTGI EIFYSGKYRS | |
| | WGFRYVQKET GKKWELFATK ELERFKYNQT TKLCEKINLY DKFEELFKGI | |
| | DKSADIYSQL CNVLDFRWKS LVYLWNLLNQ IRNVDKNAEG NKNDFIQSPV | |
| | YPFFDSRKTD GKTEPINGDA NGALNIARKG LMLVERIKNN PEKYEQLIRD | |
| | TEWDAWIQNF NKVN | |
| WP_044919442. | MYYESLTKQY PVSKTIRNEL IPIGKTLDNI RQNNILESDV KRKQNYEHVK | (SEQ |
| 1 | GILDEYHKQL INEALDNCTL PSLKIAAEIY LKNQKEVSDR EDFNKTQDLL | ID NO: |
| type V CRISPR- | RKEWVEKLKA HENFTKIGKK DILDLLEKLP SISEDDYNAL ESFRNFYTYF | 164) |
| associated | TSYNKVRENL YSDKEKSSTV AYRLINENFP KFLDNVKSYR FVKTAGILAD | |
| protein Cpf1 | GLGEEEQDSL FIVETFNKTL TQDGIDTYNS QVGKINSSIN LYNQKNQKAN | |
| [Lachnospiraceae | GFRKIPKMKM LYKQILSDRE ESFIDEFQSD EVLIDNVESY GSVLIESLKS | |
| bacterium | SKVSAFFDAL RESKGKNVYV KNDLAKTAMS NIVFENWRTF DDLLNQEYDL | |
| MA2020] | ANENKKKDDK YFEKRQKELK KNKSYSLEHL CNLSEDSCNL IENYIHQISD | |
| | DIENIIINNE TFLRIVINEH DRSRKLAKNR KAVKAIKDFL DSIKVLEREL | |
| | KLINSSGQEL EKDLIVYSAH EELLVELKQV DSLYNMTRNY LTKKPFSTEK | |
| | VKLNFNRSTL LNGWDRNKET DNLGVLLLKD GKYYLGIMNT SANKAFVNPP | |
| | VAKTEKVFKK VDYKLLPVPN QMLPKVFFAK SNIDFYNPSS EIYSNYKKGT | |
| | HKKGNMFSLE DCHNLIDFFK ESISKHEDWS KFGFKFSDTA SYNDISEFYR | |
| | EVEKQGYKLT YTDIDETYIN DLIERNELYL FQIYNKDFSM YSKGKLNLHT | |
| | LYFMMLFDQR NIDDVVYKLN GEAEVFYRPA SISEDELIIH KAGEEIKNKN | |
| | PNRARTKETS TFSYDIVKDK RYSKDKFTLH IPITMNFGVD EVKRFNDAVN | |
| | SAIRIDENVN VIGIDRGERN LLYVVVIDSK GNILEQISLN SIINKEYDIE | |
| | TDYHALLDER EGGRDKARKD WNTVENIRDL KAGYLSQVVN VVAKLVLKYN | |
| | AIICLEDLNF GFKRGRQKVE KQVYQKFEKM LIDKLNYLVI DKSREQTSPK | |
| | ELGGALNALQ LTSKFKSFKE LGKQSGVIYY VPAYLTSKID PTTGFANLFY | |
| | MKCENVEKSK RFFDGFDFIR FNALENVFEF GFDYRSFTQR ACGINSKWTV | |
| | CTNGERIIKY RNPDKNNMFD EKVVVVTDEM KNLFEQYKIP YEDGRNVKDM | |
| | IISNEEAEFY RRLYRLLQQT LQMRNSTSDG TRDYIISPVK NKREAYFNSE | |
| | LSDGSVPKDA DANGAYNIAR KGLWVLEQIR QKSEGEKINL AMTNAEWLEY | |
| | AQTHLL | |
| WP_035798880. | MYYQNLTKKY PVSKTIRNEL IPIGKTLENI RKNNILESDV KRKQDYEHVK | (SEQ |
| 1 | GIMDEYHKQL INEALDNYML PSLNQAAEIY LKKHVDVEDR EEFKKTQDLL | ID NO: |
| type V CRISPR- | RREVTGRLKE HENYTKIGKK DILDLLEKLP SISEEDYNAL ESFRNFYTYF | 165) |
| associated | TSYNKVRENL YSDEEKSSTV AYRLINENLP KFLDNIKSYA FVKAAGVLAD | |
| protein Cpf1 | CIEEEEQDAL FMVETFNMTL TQEGIDMYNY QIGKVNSAIN LYNQKNHKVE | |
| [Butyrivibrio sp. | EFKKIPKMKV LYKQILSDRE EVFIGEFKDD ETLLSSIGAY GNVLMTYLKS | |
| NC3005] | EKINIFFDAL RESEGKNVYV KNDLSKTTMS NIVFGSWSAF DELLNQEYDL | |
| | ANENKKKDDK YFEKRQKELK KNKSYTLEQM SNLSKEDISP IENYIERISE | |
| | DIEKICIYNG EFEKIVVNEH DSSRKLSKNI KAVKVIKDYL DSIKELEHDI | |
| | KLINGSGQEL EKNLVVYVGQ EEALEQLRPV DSLYNLTRNY LTKKPFSTEK | |
| | VKLNFNKSTL LNGWDKNKET DNLGILFFKD GKYYLGIMNT TANKAFVNPP | |
| | AAKTENVFKK VDYKLLPGSN KMLPKVFFAK SNIGYYNPST ELYSNYKKGT | |
| | HKKGPSFSID DCHNLIDFFK ESIKKHEDWS KFGFEFSDTA DYRDISEFYR | |
| | EVEKQGYKLT FTDIDESYIN DLIEKNELYL FQIYNKDFSE YSKGKLNLHT | |
| | LYFMMLFDQR NLDNVVYKLN GEAEVFYRPA SIAENELVIH KAGEGIKNKN | |
| | PNRAKVKETS TFSYDIVKDK RYSKYKFTLH IPITMNFGVD EVRRENDVIN | |
| | NALRTDDNVN VIGIDRGERN LLYVVVINSE GKILEQISLN SIINKEYDIE | |
| | TNYHALLDER EDDRNKARKD WNTIENIKEL KTGYLSQVVN VVAKLVLKYN | |
| | AIICLEDLNF GFKRGRQKVE KQVYQKFEKM LIEKLNYLVI DKSREQVSPE | |
| | KMGGALNALQ LTSKFKSFAE LGKQSGIIYY VPAYLTSKID PTTGFVNLFY | |
| | IKYENIEKAK QFFDGFDFIR FNKKDDMFEF SFDYKSFTQK ACGIRSKWIV | |
| | YTNGERIIKY PNPEKNNLFD EKVINVTDEI KGLFKQYRIP YENGEDIKEI | |
| | IISKAEADFY KRLFRLLHQT LQMRNSTSDG TRDYIISPVK NDRGEFFCSE | |
| | FSEGTMPKDA DANGAYNIAR KGLWVLEQIR QKDEGEKVNL SMTNAEWLKY | |
| | AQLHLL | |
| WP_027109509. | MENYYDSLTR QYPVTKTIRQ ELKPVGKTLE NIKNAEIIEA DKQKKEAYVK | (SEQ |
| 1 | VKELMDEFHK SIIEKSLVGI KLDGLSEFEK LYKIKTKTDE DKNRISELFY | ID NO: |
| type V CRISPR- | YMRKQIADAL KNSRDYGYVD NKDLIEKILP ERVKDENSLN ALSCFKGFTT | 166) |
| associated | YFTDYYKNRK NIYSDEEKHS TVGYRCINEN LLIFMSNIEV YQIYKKANIK | |
| protein Cpf1 | NDNYDEETLD KTFMIESFNE CLTQSGVEAY NSVVASIKTA TNLYIQKNNK | |
| [Lachnospiraceae | EENFVRVPKM KVLFKQILSD RTSLFDGLII ESDDELLDKL CSFSAEVDKF | |
| bacterium | LPINIDRYIK TLMDSNNGTG IYVKNDSSLT TLSNYLTDSW SSIRNAFNEN | |
| NC2008] | YDAKYTGKVN DKYEEKREKA YKSNDSFELN YIQNLLGINV IDKYIERINF | |
| | DIKEICEAYK EMTKNCFEDH DKTKKLQKNI KAVASIKSYL DSLKNIERDI | |
| | KLINGTGLES RNEFFYGEQS TVLEEITKVD ELYNITRNYL TKKPFSTEKM | |
| | KLNFNNPQLL GGWDVNKERD CYGVILIKDN NYYLGIMDKS ANKSFLNIKE | |
| | SKNENAYKKV NCKLLPGPNK MFPKVFFAKS NIDYYDPTHE IKKLYDKGTF | |
| | KKGNSFNLED CHKLIDFYKE SIKKNDDWKN FNFNFSDTKD YEDISGFFRE | |
| | VEAQNYKITY TNVSCDFIES LVDEGKLYLF QIYNKDFSEY ATGNLNLHTL | |
| | YLKMLFDERN LKDLCIKMNG EAEVFYRPAS ILDEDKVVHK ANQKITNKNT | |
| | NSKKKESIFS YDIVKDKRYT VDKFFIHLPI TLNYKEQNVS RFNDYIREIL | |
| | KKSKNIRVIG IDRGERNLLY VVVCDSDGSI LYQRSINEIV SGSHKTDYHK | |
| | LLDNKEKERL SSRRDWKTIE NIKDLKAGYM SQVVNEIYNL ILKYNAIVVL | |
| | EDLNIGFKNG RKKVEKQVYQ NFEKALIDKL NYLCIDKTRE QLSPSSPGGV | |
| | LNAYQLTAKF ESFEKIGKQT GCIFYVPAYL TSQIDPTTGF VNLFYQKDTS | |
| | KQGLQLFFRK FKKINFDKVA SNFEFVFDYN DFTNKAEGTK TNWTISTQGT | |
| | RIAKYRSDDA NGKWISRTVH PTDIIKEALN REKINYNDGH DLIDEIVSIE | |
| | KSAVLKEIYY GFKLTLQLRN STLANEEEQE DYIISPVKNS SGNYFDSRIT | |
| | SKELPCDADA NGAYNIARKG LWALEQIRNS ENVSKVKLAI SNKEWFEYTQ | |
| | NNIPSL | |
| WP_049895985. | METEILKYDF FEREGKYMYY DGLTKQYALS KTIRNELVPI GKTLDNIKKN | (SEQ |
| 1 | RILEADIKRK SDYEHVKKLM DMYHKKIINE ALDNFKLSVL EDAADIYFNK | ID NO: |
| type V CRISPR- | QNDERDIDAF LKIQDKLRKE IVEQLKGHTD YSKVGNKDFL GLLKAASTEE | 167) |
| associated | DRILIESFDN FYTYFTSYNK VRSNLYSAED KSSTVAYRLI NENLPKFFDN | |
| protein Cpf1 | IKAYRTVRNA GVISGDMSIV EQDELFEVDT FNHTLTQYGI DTYNHMIGQL | |
| [Oribacterium sp. | NSAINLYNQK MHGAGSFKKL PKMKELYKQL LTEREEEFIE EYTDDEVLIT | |
| NK2B42] | SVHNYVSYLI DYLNSDKVES FFDTLRKSDG KEVFIKNDVS KTTMSNILFD | |
| WP_029202018 | NWSTIDDLIN HEYDSAPENV KKTKDDKYFE KRQKDLKKNK SYSLSKIAAL | |
| | CRDTTILEKY IRRLVDDIEK IYTSNNVFSD IVLSKHDRSK KLSKNTNAVQ | |
| | AIKNMLDSIK DFEHDVMLIN GSGQEIKKNL NVYSEQEALA GILRQVDHIY | |
| | NLTRNYLTKK PFSTEKIKLN FNRPTFLDGW DKNKEEANLG ILLIKDNRYY | |
| | LGIMNTSSNK AFVNPPKAIS NDIYKKVDYK LLPGPNKMLP KVFFATKNIA | |
| | YYAPSEELLS KYRKGTHKKG DSFSIDDCRN LIDFFKSSIN KNTDWSTFGF | |
| | NFSDTNSYND ISDFYREVEK QGYKLSFTDI DACYIKDLVD NNELYLFQIY | |
| | NKDFSPYSKG KLNLHTLYFK MLFDQRNLDN VVYKLNGEAE VFYRPASIES | |
| | DEQIIHKSGQ NIKNKNQKRS NCKKTSTEDY DIVKDRRYCK DKFMLHLPIT | |
| | VNFGTNESGK FNELVNNAIR ADKDVNVIGI DRGERNLLYV VVVDPCGKII | |
| | EQISLNTIVD KEYDIETDYH QLLDEKEGSR DKARKDWNTI ENIKELKEGY | |
| | LSQWVNIIAK LVLKYDAIIC LEDLNFGFKR GRQKVEKQVY QKFEKMLIDK | |
| | MNYLVLDKSR KQESPQKPGG ALNALQLTSA FKSFKELGKQ TGIIYYVPAY | |
| | LTSKIDPTTG FANLFYIKYE SVDKARDFFS KFDFIRYNQM DNYFEFGFDY | |
| | KSFTERASGC KSKWIACTNG ERIVKYRNSD KNNSFDDKTV ILTDEYRSLF | |
| | DKYLQNYIDE DDLKDQILQI DSADFYKNLI KLFQLTLQMR NSSSDGKRDY | |
| | IISPVKNYRE EFFCSEFSDD TFPRDADANG AYNIARKGLW VIKQIRETKS | |
| | GTKINLAMSN SEWLEYAQCN LL | |
| WP_028248456. | MYYQNLTKMY PISKTLRNEL IPVGKTLENI RKNGILEADI QRKADYEHVK | (SEQ |
| 1 | KLMDNYHKQL INEALQGVHL SDLSDAYDLY FNLSKEKNSV DAFSKCQDKL | ID NO: |
| type V CRISPR- | RKEIVSLLKN HENFPKIGNK EIIKLLQSLY DNDTDYKALD SFSNFYTYFS | 168) |
| associated | SYNEVRKNLY SDEEKSSTVA YRLINENLPK FLDNIKAYAI AKKAGVRAEG | |
| protein Cpf1 | LSEEDQDCLF IIETFERTLT QDGIDNYNAA IGKLNTAINL FNQQNKKQEG | |
| [Pseudobutyrivibrio | FRKVPQMKCL YKQILSDREE AFIDEFSDDE DLITNIESFA ENMNVFLNSE | |
| ruminis] | IITDFKIALV ESDGSLVYIK NDVSKTSFSN IVFGSWNAID EKLSDEYDLA | |
| | NSKKKKDEKY YEKRQKELKK NKSYDLETII GLFDDNSDVI GKYIEKLESD | |
| | ITAIAEAKND FDEIVLRKHD KNKSLRKNTN AVEAIKSYLD TVKDFERDIK | |
| | LINGSGQEVE KNLVVYAEQE NILAEIKNVD SLYNMSRNYL TQKPFSTEKF | |
| | KLNFNRATLL NGWDKNKETD NLGILFEKDG MYYLGIMNTK ANKIFVNIPK | |
| | ATSNDVYHKV NYKLLPGPNK MLPKVFFAQS NLDYYKPSEE LLAKYKAGTH | |
| | KKGDNFSLED CHALIDFFKA SIEKHPDWSS FGFEFSETCT YEDLSGFYRE | |
| | VEKQGYKITY TDVDADYITS LVERDELYLF QIYNKDFSPY SKGNLNLHTI | |
| | YLQMLFDQRN LNNVVYKLNG EAEVFYRPAS INDEEVIIHK AGEEIKNKNS | |
| | KRAVDKPTSK FGYDIIKDRR YSKDKFMLHI PVTMNFGVDE TRRFNDVVND | |
| | ALRNDEKVRV IGIDRGERNL LYVWVVDTDG TILEQISLNS IINNEYSIET | |
| | DYHKLLDEKE GDRDRARKNW TTIENIKELK EGYLSQVVNV IAKLVLKYNA | |
| | IICLEDLNFG FKRGRQKVEK QVYQKFEKML IDKLNYLVID KSRKQDKPEE | |
| | FGGALNALQL TSKFTSFKDM GKQTGIIYYV PAYLTSKIDP TTGFANLFYV | |
| | KYENVEKAKE FFSRFDSISY NNESGYFEFA FDYKKFTDRA CGARSQWTVC | |
| | TYGERIIKFR NTEKNNSFDD KTIVLSEEFK ELFSIYGISY EDGAELKNKI | |
| | MSVDEADFFR SLTRLFQQTM QMRNSSNDVT RDYIISPIMN DRGEFFNSEA | |
| | CDASKPKDAD ANGAFNIARK GLWVLEQIRN TPSGDKLNLA MSNAEWLEYA | |
| | QRNQI | |
| WP_028830240 | MENFKNLYPI NKTLRFELRP YGKTLENFKK SGLLEKDAFK ANSRRSMQAI | (SEQ |
| type V CRISPR- | IDEKFKETIE ERLKYTEFSE CDLGNMTSKD KKITDKAATN LKKQVILSFD | ID NO: |
| associated | DEIFNNYLKP DKNIDALFKN DPSNPVISTF KGFTTYFVNF FEIRKHIFKG | 169) |
| protein Cpf1 | ESSGSMAYRI IDENLTTYLN NIEKIKKLPE ELKSQLEGID QIDKLNNYNE | |
| [Proteocatella | FITQSGITHY NEIIGGISKS ENVKIQGINE GINLYCQKNK VKLPRLTPLY | |
| sphenisci] | KMILSDRVSN SFVLDTIEND TELIEMISDL INKTEISQDV IMSDIQNIFI | |
| | KYKQLGNLPG ISYSSIVNAI CSDYDNNFGD GKRKKSYEND RKKHLETNVY | |
| | SINYISELLT DTDVSSNIKM RYKELEQNYQ VCKENFNATN WMNIKNIKQS | |
| | EKTNLIKDLL DILKSIQRFY DLFDIVDEDK NPSAEFYTWL SKNAEKLDFE | |
| | FNSVYNKSRN YLTRKQYSDK KIKLNFDSPT LAKGWDANKE IDNSTIIMRK | |
| | FNNDRGDYDY FLGIWNKSTP ANEKIIPLED NGLFEKMQYK LYPDPSKMLP | |
| | KQFLSKIWKA KHPTTPEFDK KYKEGRHKKG PDFEKEFLHE LIDCFKHGLV | |
| | NHDEKYQDVF GFNLRNTEDY NSYTEFLEDV ERCNYNLSFN KIADTSNLIN | |
| | DGKLYVFQIW SKDFSIDSKG TKNLNTIYFE SLFSEENMIE KMFKLSGEAE | |
| | IFYRPASLNY CEDIIKKGHH HAELKDKFDY PIIKDKRYSQ DKFFFHVPMV | |
| | INYKSEKLNS KSLNNRTNEN LGQFTHIIGI DRGERHLIYL TVVDVSTGEI | |
| | VEQKHLDEII NTDTKGVEHK THYLNKLEEK SKTRDNERKS WEAIETIKEL | |
| | KEGYISHVIN EIQKLQEKYN ALIVMENLNY GFKNSRIKVE KQVYQKFETA | |
| | LIKKENYIID KKDPETYIHG YQLTNPITTL DKIGNQSGIV LYIPAWNTSK | |
| | IDPVTGFVNL LYADDLKYKN QEQAKSFIQK IDNIYFENGE FKFDIDFSKW | |
| | NNRYSISKTK WTLTSYGTRI QTFRNPQKNN KWDSAEYDLT EEFKLILNID | |
| | GTLKSQDVET YKKFMSLFKL MLQLRNSVTG TDIDYMISPV TDKTGTHFDS | |
| | RENIKNLPAD ADANGAYNIA RKGIMAIENI MNGISDPLKI SNEDYLKYIQ | |
| | NQQE | |
| WP_084502895. | MIILYISTSN MNMEGVFMEN FKNLYPINKT LRFELRPYGK TLENFKKSGL | (SEQ |
| 1 | LEKDAFKANS RRSMQAIIDE KFKETIEERL KYTEFSECDL GNMTSKDKKI | ID NO: |
| type V CRISPR- | TDKAATNLKK QVILSFDDEI FNNYLKPDKN IDALFKNDPS NPVISTFKGF | 170) |
| associated | TTYFVNFFEI RKHIFKGESS GSMAYRIIDE NLTTYLNNIE KIKKLPEELK | |
| protein Cpf1 | SQLEGIDQID KLNNYNEFIT QSGITHYNEI IGGISKSENV KIQGINEGIN | |
| [Proteocatella | LYCQKNKVKL PRLTPLYKMI LSDRVSNSFV LDTIENDTEL IEMISDLINK | |
| sphenisci] | TEISQDVIMS DIQNIFIKYK QLGNLPGISY SSIVNAICSD YDNNFGDGKR | |
| | KKSYENDRKK HLETNVYSIN YISELLTDTD VSSNIKMRYK ELEQNYQVCK | |
| | ENFNATNWMN IKNIKQSEKT NLIKDLLDIL KSIQRFYDLF DIVDEDKNPS | |
| | AEFYTWLSKN AEKLDFEFNS VYNKSRNYLT RKQYSDKKIK LNFDSPTLAK | |
| | GWDANKEIDN STIIMRKFNN DRGDYDYFLG IWNKSTPANE KIIPLEDNGL | |
| | FEKMQYKLYP DPSKMLPKQF LSKIWKAKHP TTPEFDKKYK EGRHKKGPDF | |
| | EKEFLHELID CFKHGLVNHD EKYQDVFGFN LRNTEDYNSY TEFLEDVERC | |
| | NYNLSFNKIA DTSNLINDGK LYVFQIWSKD FSIDSKGTKN LNTIYFESLF | |
| | SEENMIEKMF KLSGEAEIFY RPASLNYCED IIKKGHHHAE LKDKFDYPII | |
| | KDKRYSQDKF FFHVPMVINY KSEKLNSKSL NNRTNENLGQ FTHIIGIDRG | |
| | ERHLIYLTVV DVSTGEIVEQ KHLDEIINTD TKGVEHKTHY LNKLEEKSKT | |
| | RDNERKSWEA IETIKELKEG YISHVINEIQ KLQEKYNALI VMENLNYGFK | |
| | NSRIKVEKQV YQKFETALIK KENYIIDKKD PETYIHGYQL TNPITTLDKI | |
| | GNQSGIVLYI PAWNTSKIDP VTGFVNLLYA DDLKYKNQEQ AKSFIQKIDN | |
| | IYFENGEFKF DIDFSKWNNR YSISKTKWTL TSYGTRIQTF RNPQKNNKWD | |
| | SAEYDLTEEF KLILNIDGTL KSQDVETYKK FMSLFKLMLQ LRNSVTGTDI | |
| | DYMISPVTDK TGTHFDSREN IKNLPADADA NGAYNIARKG IMAIENIMNG | |
| | ISDPLKISNE DYLKYIQNQQ E | |
| WP_055225123. | MNNGTNNFQN FIGISSLQKT LRNALIPTET TQQFIVKNGI IKEDELRGEN | (SEQ |
| 1 | RQILKDIMDD YYRGFISETL SSIDDIDWTS LFEKMEIQLK NGDNKDTLIK | ID NO: |
| Eubacterium | EQTEYRKAIH KKFANDDRFK NMFSAKLISD ILPEFVIHNN NYSASEKEEK | 171) |
| rectale | TQVIKLFSRF ATSFKDYFKN RANCFSADDI SSSSCHRIVN DNAEIFFSNA | |
| | LVYRRIVKSL SNDDINKISG DMKDSLKEMS LEEIYSYEKY GEFITQEGIS | |
| | FYNDICGKVN SFMNLYCQKN KENKNLYKLQ KLHKQILCIA DTSYEVPYKF | |
| | ESDEEVYQSV NGFLDNISSK HIVERLRKIG DNYNGYNLDK IYIVSKFYES | |
| | VSQKTYRDWE TINTALEIHY NNILPGNGKS KADKVKKAVK NDLQKSITEI | |
| | NELVSNYKLC SDDNIKAETY IHEISHILNN FEAQELKYNP EIHLVESELK | |
| | ASELKNVLDV IMNAFHWCSV FMTEELVDKD NNFYAELEEI YDEIYPVISL | |
| | YNLVRNYVTQ KPYSTKKIKL NFGIPTLADG WSKSKEYSNN AIILMRDNLY | |
| | YLGIFNAKNK PDKKIIEGNT SENKGDYKKM IYNLLPGPNK MIPKVFLSSK | |
| | TGVETYKPSA YILEGYKQNK HIKSSKDFDI TFCHDLIDYF KNCIAIHPEW | |
| | KNFGFDFSDT STYEDISGFY REVELQGYKI DWTYISEKDI DLLQEKGQLY | |
| | LFQIYNKDFS KKSTGNDNLH TMYLKNLFSE ENLKDIVLKL NGEAEIFFRK | |
| | SSIKNPIIHK KGSILVNRTY EAEEKDQFGN IQIVRKNIPE NIYQELYKYF | |
| | NDKSDKELSD EAAKLKNVVG HHEAATNIVK DYRYTYDKYF LHMPITINFK | |
| | ANKTGFINDR ILQYIAKEKD LHVIGIDRGE RNLIYVSVID TCGNIVEQKS | |
| | FNIVNGYDYQ IKLKQQEGAR QIARKEWKEI GKIKEIKEGY LSLVIHEISK | |
| | MVIKYNAIIA MEDLSYGFKK GRFKVERQVY QKFETMLINK LNYLVFKDIS | |
| | ITENGGLLKG YQLTYIPDKL KNVGHQCGCI FYVPAAYTSK IDPTTGFVNI | |
| | FKFKDLTVDA KREFIKKFDS IRYDSEKNLF CFTFDYNNFI TQNTVMSKSS | |
| | WSVYTYGVRI KRRFVNGRFS NESDTIDITK DMEKTLEMTD INWRDGHDLR | |
| | QDIIDYEIVQ HIFEIFRLTV QMRNSLSELE DRDYDRLISP VLNENNIFYD | |
| | SAKAGDALPK DADANGAYCI ALKGLYEIKQ ITENWKEDGK FSRDKLKISN | |
| | KDWFDFIQNK RYL | |
| WP_055237260. | MNNGTNNFQN FIGISSLQKT LRNALIPTET TQQFIVKNGI IKEDELRGEN | (SEQ |
| 1 | RQILKDIMDD YYRGFISETL SSIDDIDWTS LFEKMEIQLK NGDNKDTLIK | ID NO: |
| Eubacterium | EQAEKRKAIY KKFADDDRFK NMFSAKLISD ILPEFVIHNN NYSASEKEEK | 172) |
| rectale | TQVIKLFSRF ATSFKDYFKN RANCFSADDI SSSSCHRIVN DNAEIFFSNA | |
| | LVYRRIVKNL SNDDINKISG DMKDSLKEMS LDEIYSYEKY GEFITQEGIS | |
| | FYNDICGKVN SFMNLYCQKN KENKNLYKLR KLHKQILCIA DTSYEVPYKF | |
| | ESDEEVYQSV NGFLDNISSK HIVERLRKIG DNYNGYNLDK IYIVSRFYES | |
| | VSQKTYRDWE TINTALEIHY NNILPGNGKS KADKVKKAVK NDLQKSITEI | |
| | NELVSNYKLC PDDNIKAETY IHEISHILNN FEAQELKYNP EIHLVESELK | |
| | ASELKNVLDV IMNAFHWCSV FMTEELVDKD NNFYAELEEI YDEIYPVISL | |
| | YNLVRNYVTQ KPYSTKKIKL NFGIPTLADG WSKSKEYSNN AIILMRDNLY | |
| | YLGIFNAKNK PDKKIIEGNT SENKGDYKKM IYNLLPGPNK MIPKVFLSSK | |
| | TGVETYKPSA YILEGYKQNK HLKSSKDFDI TFCRDLIDYF KNCIAIHPEW | |
| | KNFGFDFSDT STYEDISGFY REVELQGYKI DWTYISEKDI DLLQEKGQLY | |
| | LFQIYNKDFS KKSTGNDNLH TMYLKNLFSE ENLKDIVLKL NGEAEIFFRK | |
| | SSIKNPIIHK KGSILVNRTY EAEEKDQFGN IQIVRKTIPE NIYQELYKYF | |
| | NDKSDKELSD EAAKLKNWVG HHEAATNIVK DYRYTYDKYF LHMPITINFK | |
| | ANKTSFINDR ILQYIAKEND LHVIGIDRGE RNLIYVSVID TCGNIVEQKS | |
| | FNIVNGYDYQ IKLKQQEGAR QIARKEWKEI GKIKEIKEGY LSLVIHEISK | |
| | MVIKYNAIIA MEDLSYGFKK GRFKVERQVY QKFETMLINK LNYLVFKDIS | |
| | ITENGGLLKG YQLTYIPEKL KNVGHQCGCI FYVPAAYTSK IDPTTGFANI | |
| | FKFKDLTVDA KREFIKKFDS IRYDSEKNLF CFTFDYNNFI TQNTVMSKSS | |
| | WSVYTYGVRI KRRFVNGRFS NESDTIDITK DMEKTLEMTD INWRDGHDLR | |
| | QDIIDYEIVQ HIFEIFKLTV QMRNSLSELE DRDYDRLISP VLNENNIFYD | |
| | SAKAGDALPK DADANGAYCI ALKGLYEIKQ ITENWKEDGK FSRDKLKISN | |
| | KDWFDFIQNK RYL | |
| WP_055272206. | MNNGTNNFQN FIGISSLQKT LRNALTPTET TQQFIVKNGI IKEDELRGEN | (SEQ |
| 1 | RQILKDIMDD YYRGFISETL SSIDDIDWTS LFEKMEIQLK NGDNKDTLIK | ID NO: |
| Eubacterium | EQAEKRKAIY KKFADDDRFK NMFSAKLISD ILPEFVIHNN NYSASEKEEK | 173) |
| rectale | TQVIKLFSRF ATSFKDYFKN RANCFSADDI SSSSCHRIVN DNAEIFFSNA | |
| | LVYRRIVKNL SNDDINKISG DMKDSLKKMS LEKIYSYEKY GEFITQEGIS | |
| | FYNDICGKVN SFMNLYCQKN KENKNLYKLR KLHKQILCIA DTSYEVPYKF | |
| | ESDEEVYQSV NGFLDNISSK HIVERLRKIG DNYNGYNLDK IYIVSKFYES | |
| | VSQKTYRDWE TINTALEIHY NNILPGNGKS KADKVKKAVK NDLQKSITEI | |
| | NELVSNYKLC PDDNIKAETY IHEISHILNN FEAQELKYNP EIHLVESELK | |
| | ASELKNVLDV IMNAFHWCSV FMTEELVDKD NNFYAELEEI YDEIYPVISL | |
| | YNLVRNYVTQ KPYSTKKIKL NFGIPTLADG WSKSKEYSNN AIILMRDNLY | |
| | YLGIFNAKNK PEKKIIEGNT SENKGDYKKM IYNLLPGPNK MIPKVFLSSK | |
| | TGVETYKPSA YILEGYKQNK HLKSSKDFDI TFCRDLIDYF KNCIAIHPEW | |
| | KNFGFDFSDT STYEDISGFY REVELQGYKI DWTYISEKDI DLLQEKGQLY | |
| | LFQIYNKDFS KKSTGNDNLH TMYLKNLFSE ENLKDVVLKL NGEAEIFFRK | |
| | SSIKNPIIHK KGSILVNRTY EAEEKDQFGN IQIVRKTIPE NIYQELYKYF | |
| | NDKSDKELSD EAAKLKNAVG HHEAATNIVK DYRYTYDKYF LHMPITINFK | |
| | ANKTSFINDR ILQYIAKEKD LHVIGIDRGE RNLIYVSVID TCGNIVEQKS | |
| | FNIVNGYDYQ IKLKQQEGAR QIARKEWKEI GKIKEIKEGY LSLVIHEISK | |
| | MVIKYNAIIA MEDLSYGFKK GRFKVERQVY QKFETMLINK LNYLVFKDIS | |
| | ITENGGLLKG YQLTYIPEKL KNVGHQCGCI FYVPAAYTSK IDPTTGFVNI | |
| | FKFKDLTVDA KREFIKKFDS IRYDSDKNLF CFTFDYNNFI TQNTVMSKSS | |
| | WSVYTYGVRI KRRFVNGRFS NESDTIDITK DMEKTLEMTD INWRDGHDLR | |
| | QDIIDYEIVQ HIFEIFKLTV QMRNSLSELE DRNYDRLISP VLNENNIFYD | |
| | SAKAGDALPK DADANGAYCI ALKGLYEIKQ ITENWKEDGK FSRDKLKISN | |
| | KDWFDFIQNK RYL | |
| OLA16049.1 | MNNGTNNFQN FIGISSLQKT LRNALIPTET TQQFIVKNGI IKEDELRGKN | (SEQ |
| Eubacterium sp. | RQILKDIMDD YYRGFISETL SSIDDIDWTS LFEKMEIQLK NGDNKDTLIK | ID NO: |
| 41_20 | EQAEKRKAIY KKFADDDRFK NMFSAKLISD ILPEFVIHNN NYSASEKKEK | 174) |
| | TQVIKLFSRF ATSFKDYFKN RANCFSADDI SSSSCHRIVN DNAEIFFSNA | |
| | LVYRRIVKNL SNDDINKISG DMKDSLKEMS LEEIYSYEKY GEFITQEGIS | |
| | FYNDICGKVN SFMNLYCQKN KENKNLYKLR KLHKQILCIA DTSYEVPYKF | |
| | ESDEEVYQSV NGFLDNISSK HIVERLRKIG DNYNDYNLDK IYIVSKFYES | |
| | VSQKTYRDWE TINTALEIHY NNILPGNGKS KADKVKKAVK NDLQKSITEI | |
| | NELVSNYKLC SDDNIKAETY IHEISHILNN FEAHELKYNP EIHLVESELK | |
| | ASELKNVLDI IMNAFHWCSV FMTEELVDKD NNFYAELEEI YDEIYPVISL | |
| | YNLVRNYVTQ KPYSTKKIKL NFGIPTLADG WSKSKEYSNN AIILMRDNLY | |
| | YLGIFNAKNK PDKKIIEGNT SENKGDYKKM IYNLLPGPNK MIPKVFLSSK | |
| | TGVETYKPSA YILEGYKQNK HLKSSKDFDI TFCHDLIDYF KNCIAIHPEW | |
| | KNFGFDFSDT SAYEDISGFY REVELQGYKI DWTYISEKDI DLLQEKGQLY | |
| | LFQIYNKDFS KKSTGNDNLH TMYLKNLFSE ENLKDIVLKL NGEAEIFFRK | |
| | SSIKNPIIHK KGSILVNRTY EAEEKDQFGN IQIVRKTIPE NIYQELYKYF | |
| | NDKSDKELSD EAAKLKNVVG HHEAATNIVK DYRYTYDKYF LHMPITINFK | |
| | ANKTSFINDR ILQYIAKEKD LHVIGIDRGE RNLIYVSVID TCGNIVEQKS | |
| | FNIVNGYDYQ IKLKQQEGAR QIARKEWKEI GKIKEIKEGY LSLVIHEISK | |
| | MVIKYNAIIA MEDLSYGFKK GRFKVERQVY QKFETMLINK LNYLVFKDIS | |
| | ITENGGLLKG YQLTYIPDKL KNVGHQCGCI FYVPAAYTSK IDPTTGFVNI | |
| | FKFKDLTVDA KREFIKKFDS IRYDSEKNLF CFTFDYNNFI TQNTVMSKSS | |
| | WSVYTYGVRI KRRFVNGRFS NESDTIDITK DMEKTLEMTD INWRDGHDLR | |
| | QDIIDYEIVQ HIFEIFKLTV QMRNSLSELE DRDYDRLISP VLNENNIFYD | |
| | SAKAGYALPK DADANGAYCI ALKGLYEIKQ ITENWKEDGK FSRDKLKISN | |
| | KDWFDFIQNK RYL | |

TABLE 6
Cas12b (C2c1) orthologs

| | | |
|---|---|---|
| Alicyclobacillus | MVAVKSIKVK LMLGHLPEIR EGLWHLHEAV NLGVRYYTEW LALLRQGNLY | (SEQ |
| macrosporangiidus | RRGKDGAQEC YMTAEQCRQE LLVRLRDRQK RNGHTGDPGT DEELLGVARR | ID NO: |
| strain DSM | LYELLVPQSV GKKGQAQMLA SGFLSPLADP KSEGGKGTSK SGRKPAWMGM | 175) |
| 17980 | KEAGDSRWVE AKARYEANKA KDPTKQVIAS LEMYGLRPLF DVFTETYKTI | |
| WP_074948407.1 | RWMPLGKHQG VRAWDRDMFQ QSLERLMSWE SWNERVGAEF | |
| | ARLVDRRDRF | |
| | REKHFTGQEH LVALAQRLEQ EMKEASPGFE SKSSQAHRIT KRALRGADGI | |
| | IDDWLKLSEG EPVDRFDEIL RKRQAQNPRR FGSHDLFLKL AEPVFQPLWR | |
| | EDPSFLSRWA SYNEVLNKLE DAKQFATFTL PSPCSNPVWA RFENAEGTNI | |
| | FKYDFLFDHF GKGRHGVRFQ RMIVMRDGVP TEVEGIVVPI APSRQLDALA | |
| | PNDAASPIDV FVGDPAAPGA FRGQFGGAKI QYRRSALVRK GRREEKAYLC | |
| | GFRLPSQRRT GTPADDAGEV FLNLSLRVES QSEQAGRRNP PYAAVFHISD | |
| | QTRRVIVRYG EIERYLAEHP DTGIPGSRGL TSGLRVMSVD LGLRTSAAIS | |
| | VFRVAHRDEL TPDAHGRQPF FFPIHGMDHL VALHERSHLI RLPGETESKK | |
| | VRSIREQRLD RLNRLRSQMA SLRLLVRTGV LDEQKRDRNW ERLQSSMERG | |
| | GERMPSDWWD LFQAQVRYLA QHRDASGEAW GRMVQAAVRT | |
| | LWRQLAKQVR | |
| | DWRKEVRRNA DKVKIRGIAR DVPGGHSLAQ LDYLERQYRF LRSWSAFSVQ | |
| | AGQVVRAERD SRFAVALREH IDNGKKDRLK KLADRILMEA LGYVYVTDGR | |
| | RAGQWQAVYP PCQLVLLEEL SEYRFSNDRP PSENSQLMVW SHRGVLEELI | |
| | HQAQVHDVLV GTIPAAFSSR FDARTGAPGI RCRRVPSIPL KDAPSIPIWL | |
| | SHYLKQTERD AAALRPGELI PTGDGEFLVT PAGRGASGVR WVHADINAAH | |
| | NLQRRLWENF DLSDIRVRCD RREGKDGTW LIPRLTNQRV KERYSGVIFT | |
| | SEDGVSFTVG DAKTRRRSSA SQGEGDDLSD EEQELLAEAD DARERSVVLF | |
| | RDPSGFVNGG RWTAQRAFWG MVHNRIETLL AERFSVSGAA EKVRG | |
| Bacillus hisashii | MATRSFILKI EPNEEVKKGL WKTHEVLNHG IAYYMNILKL IRQEAIYEHH | (SEQ |
| strain C4 | EQDPKNPKKV SKAEIQAELW DFVLKMQKCN SFTHEVDKDE VFNILRELYE | ID NO: |
| WP_095142515.1 | ELVPSSVEKK GEANQLSNKF LYPLVDPNSQ SGKGTASSGR KPRWYNLKIA | 176) |
| | GDPSWEEEKK KWEEDKKKDP LAKILGKLAE YGLIPLFIPY TDSNEPIVKE | |
| | IKWMEKSRNQ SVRRLDKDMF IQALERFLSW ESWNLKVKEE YEKVEKEYKT | |
| | LEERIKEDIQ ALKALEQYEK ERQEQLLRDT LNTNEYRLSK RGLRGWREII | |
| | QKWLKMDENE PSEKYLEVFK DYQRKHPREA GDYSVYEFLS KKENHFIWRN | |
| | HPEYPYLYAT FCEIDKKKKD AKQQATFTLA DPINHPLWVR FEERSGSNLN | |
| | KYRILTEQLH TEKLKKKLTV QLDRLIYPTE SGGWEEKGKV DIVLLPSRQF | |
| | YNQIFLDIEE KGKHAFTYKD ESIKFPLKGT LGGARVQFDR DHLRRYPHKV | |
| | ESGNVGRIYF NMTVNIEPTE SPVSKSLKIH RDDFPKVVNF KPKELTEWIK | |
| | DSKGKKLKSG IESLEIGLRV MSIDLGQRQA AAASIFEVVD QKPDIEGKLF | |
| | FPIKGTELYA VHRASFNIKL PGETLVKSRE VLRKAREDNL KLMNQKLNFL | |
| | RNVLHFQQFE DITEREKRVT KWISRQENSD VPLVYQDELI QIRELMYKPY | |
| | KDWVAFLKQL HKRLEVEIGK EVKHWRKSLS DGRKGLYGIS LKNIDEIDRT | |
| | RKFLLRWSLR PTEPGEVRRL EPGQRFAIDQ LNHLNALKED RLKKMANTII | |
| | MHALGYCYDV RKKKWQAKNP ACQIILFEDL SNYNPYEERS RFENSKLMKW | |
| | SRREIPRQVA LQGEIYGLQV GEVGAQFSSR FHAKTGSPGI RCSVVTKEKL | |
| | QDNRFFKNLQ REGRLTLDKI AVLKEGDLYP DKGGEKFISL SKDRKCVTTH | |
| | ADINAAQNLQ KRFWTRTHGF YKVYCKAYQV DGQTVYIPES KDQKQKIIEE | |
| | FGEGYFILKD GVYEWVNAGK LKIKKGSSKQ SSSELVDSDI LKDSFDLASE | |
| | LKGEKLMLYR DPSGNVFPSD KWMAAGVFFG KLERILISKL TNQYSISTIE | |
| | DDSSKQSM | |
| Candidatus | MPRDDLDLLT NLNSTAKGIR ERGKTKEGTD KKKSGRKSSW PMDKAAWETA | (SEQ |
| Lindowbacteria | KTSDSSAHFL EKLKQHPDLK DAFGNLSSGG SKKLEYYKKL AGSAPWKESQ | ID NO: |
| bacterium | SVILEKAARW KEAKQEREEK EQDSSEHGSK AAYRRLFDAG CLPMPEFAKY | 177) |
| RIFCSPLOWO2 | IDENQIEFGD LKLSDCGAEW KRGMWNQAGQ RVRSHMGWQR | |
| OGH55994.1 | RREKENAVYS | |
| | LRKELFEKGG AIRRKKSEEL TPEDILPGKA APDQNDWQER PAYGNQMWFI | |
| | GLRSYEENEM AKYAEEAGMG SRSAPRIRRG TIKGWSKLRE RWLQILKRNP | |
| | QATRDDLIGE LNALRSQDPR AYGDARLFDW LSKTDQRFLW DGFDADGKIL | |
| | CGRDDRDCVS AFVAYNEEFA DEPSSITLTE TDERLHPVWP FFGESSAVPY | |
| | EIEYDLETAC PTAIRLPLLV GKENGGYAER QGTRLPLAEY ADLASSFQLP | |
| | TPVRLDVLVE IREVTRAGRK VTCPFSYFKQ NGVWYVREGE IPSGESIQIK | |
| | QTDRKIENGK IFISSKLRMA YRDDLMVSPA TGDFGSIKIL WERIELASHV | |
| | DQKKLPETAP ARSRVFVSFS CNVVERAPRK QLTRKPDAVV VTIPSGVDQG | |
| | LVVVSTDVRT GKSKSSSAPP LPPGSRLWPA DAVHGDPPLR ILSVDLGHRH | |
| | SAYAVWELGL QQKSWRAGVL KGSTQTPVYA DCTGTGLLCL PGDGEDTPAE | |
| | EESLRLRSRQ IRRRLNLQNS ILRVSRLLSL DKFEKTIFEQ SDVRDRPNKK | |
| | GLRIRRRCRT EKTPLSEAEV RKNCDKAAEI LIRWADTDAM AKSLAATGNA | |
| | DISFWKYMAV KNPPLSAVVD VAPSTIVPDD GPDRETLKKK RQEEEEKFAS | |
| | SIYENRVKLA GALCSGYDAD HRRPATGGLW HDLDRTLIRE ISYGDRGQKG | |
| | NPRKLNNEGI LRLLRRPPRA RPDWREFHRT LNDANRIPKG RTLRGGLSMG | |
| | RLNFLKEVGD FVKKWSCRPR WPGDRRHIPP GQLFDRQDAE HLEHLRDDRI | |
| | KRLAHLIVAQ ALGFEPDIRR GLWKYVDGST GEILWQHPET RRFFAEGAAG | |
| | ELREVSRPAE IDDDAAARPH TVSAPAHIVV FENLIRYRFQ SDRPKTENAG | |
| | LMQWAHRQIV HFTKQVASLY GLKVAMVYAA FSSKFCSRCG SPGARVSRFD | |
| | PAWRNQEWFK RRTSNPRSKV DHSLKRASED PTADETRPWV LIEGGKEFVC | |
| | ANAKCSAHDE PLNADENAAA NIGLRFLRGV EDFRTKVNPA GALKGKLRFE | |
| | TGIHSFRPPV SGSPFWSPMA EPAQKKKIGA AAPGADVDEA GDADESGVVV | |
| | LFRDPSGAFR NKQYWYEGKI FWSNVMMAVE AKIAGASVGA KPVAASWGQA | |
| | QPQSGPGLAK PGGD | |
| Elusimicrobia | MNRIYQGRVT KVEVPDGKDE KGNIKWKKLE NWSDILWQHH MLFQDAVNYY | (SEQ |
| bacterium | TLALAAISGS AVGSDEKSII LREWAVQVQN IWEKAKKKAT VFEGPQKRLT | ID NO: |
| RIFOXYA12 | SILGLEQNAS FDIAAKHILR TSEAKPEQRA SALIRLLEEI DKKNHNVVCG | 178) |
| OGS02326.1 | ERLPFFCPRN IQSKRSPTSK AVSSVQEQKR QEEVRRFHNM QPEEVVKNAV | |
| | TLDISLFKSS PKIVFLEDPK KARAELLKQF DNACKKHKEL VGIKKAFTES | |
| | IDKHGSSLKV PAPGSKPSGL YPSAIVFKYF PVDITKTVFL KATEKLAMGK | |
| | DREVTNDPIA DARVNDKPHF DYFTNIALIR EKEKNRAAWF EFDLAAFIEA | |
| | IMSPHRFYQD TQKRKEAARK LEEKIKAIEG KGGQFKESDS EDDDVDSLPG | |
| | FEGDTRIDLL RKLVTDTLGW LGESETPDNN EGKKTEYSIS ERTLRIFPDI | |
| | QKQWSELAEK GETTEGKLLE VLKHEQTEHQ SDFGSATLYQ HLAKPEFHPI | |
| | WLKSGTEEWH AENPLKAWLN YKELQYELTD KKRPIHFTPA HPVYSPRYFD | |
| | FPKKSETEEK EVSKNTHSLT TSLASEHIKN SLQFTAGLIR KTNVGKKAIK | |
| | ARFSYSAPRL RRDCLRSENN ENLYKAPWLQ PMMRALGIDE EKADRQNFAN | |
| | TRITLMAKGL DDIQLGFPVE ANSQELQKEV SNGISWKGQF NWGGIASLSA | |
| | LRWPHEKKPK NPPEQPWWGI DSFSCLAVDL GQRYAGAFAR LDVSTIEKKG | |
| | KSRFIGEACD KKWYAKVSRM GLLRLPGEDV KVWRDASKID KENGFAFRKE | |
| | LFGEKGRSAT PLEAEETAEL IKLFGANEKD VMPDNWSKEL SFPEQNDKLL | |
| | IVARRAQAAV SRLHRWAWFF DEAKRSDDAI REILESDDTD LKQKVNKNEI | |
| | EKVKETIISL LKVKQELLPT LLTRLANRVL PLRGRSWEWK KHHQKNDGFI | |
| | LDQTGKAMPN VLIRGQRGLS MDRIEQITEL RKRFQALNQS LRRQIGKKAP | |
| | AKRDDSIPDC CPDLLEKLDH MKEQRVNQTA HMILAEALGL KLAEPPKDKK | |
| | ELNETCDMHG AYAKVDNPVS FIVIEDLSRY RSSQGRSPRE NSRLMKWCHR | |
| | AVRDKLKEMC EVFFPLCERR KAGSAWVSLP PLLETPAAYS SRFCSRSGVA | |
| | GFRAVEVIPG FELKYPWSWL KDKKDKAGNL AKEALNIRTV SEQLKAFNQD | |
| | KPEKPRTLLV PIAGGPIFVP ISEVGLSSFG LKPQVVQADI NAAINLGLRA | |
| | ISDPRIWEIH PRLRTEKRDG RLFAREKRKY GEEKVEVQPS KNEKAKKVKD | |
| | DRKPNYFADF SGKVDWGFGN IKNESGLTLV SGKALWWTIN QLQWERCFDI | |
| | NKRHIEDWSN KQKQ | |
| Omnitrophica | MNRIYQGRVT KVEKLKNGKS PDDREELKDW QTALWRHHEL FQDAVSYYTL | (SEQ |
| WOR_2 | ALAAMAEGLP DKHPINVLRK RMEEAWEEFP RKTVTPAKNL RDSVRPWLGL | ID NO: |
| bacterium | SESASFGDAL KKILPPAPEN KEVRALAVAL LAEKARTLKP QKTSASYWGR | 179) |
| RIFCSPHIGHO2 | FCDDLKKKPN WDYSEEELAR KTGSGDWVAG LWSEDALNKI DELAKSLKLS | |
| OGX36711.1 | SLVKCVPDGQ INPEGARNLV KEALDHLEGV SNGTKKEKND PGPAKKTNNW | |
| | LRQHASDVRN FIHKNKNQFS SLPNGRLITE RARGGGININ KTYAGVLFKA | |
| | FPCPFTFDYV RAAVPEPKVK KVDQEKKSEQ SATWTELEKR ILRIGDDPIE | |
| | LARKNNKPIF KAFTALEKWS DQNSKSCWSD FDKCAFEEAL KTLNQFNQKT | |
| | EEREKRRSEA EAELKYMMDE NPEWKPKKET EGDDVREVPI LKGDPRYEKL | |
| | VKLFGDLDEE GSEHATGKIY GPSRASLRGF GKLRNEWVDL FTKANDNPRE | |
| | QDLQKAVTGF QREHKLDMGY TAFFLKLCER DYWDIWRDDT EVEVKKIREK | |
| | RWVKSVVYAA ADTRELAEEL ERLQEPVRYT PAEPQFSRRL FMFSDIKGKQ | |
| | GAKHIREGLV EVSLAVKDQS GKYGTCRVRL HYSAPRLIRD HLSDGSSSMW | |
| | LQPMMAALGL SSDARGCFTR DSKGNVKEPA VALMSDFVGR KRELRMLLNF | |
| | PVDLDISKLE ENIGKKARWE KQMNTAYEKN KLKQRFHLIW PGMELKETQE | |
| | PGQFWWDNPT IQKEGMYCLA IDLSQRRAAD YALLHAGVNR DSKTFVELGQ | |
| | AGGQSWFTKL CAAGSLRLPG EDTEVIREGK RQIELSGKKG RNATQSEYDQ | |
| | AIALAKQLLH NENSAELESA ARDWLGDNAK RFSFPEQNDK LIDLYYGALS | |
| | RYKTWLRWSW RLTEQHKELW DKTLDEIRKV PYFASWGELA GNGTNEATVQ | |
| | QLQKLIADAA VDLRNFLEKA LLHIAYRALP LRENTWRWIE NGKDGKGKPL | |
| | HLLVSDGQSP AEIPWLRGQR GLSIARIEQL ENFRRAVLSL NRLLRHEIGT | |
| | KPEFGSSTCG ESLPDPCPDL TDKIVRLKEE RVNQTAHLII AQSLGVRLKG | |
| | HSLFTEEREK ADMHGEHEVI PGRSPVDFVV LEDLSRYTTD KSRSRSENSR | |
| | LMKWCHRKIN EKVKLLAEPF GIPVIEVFAS YSSKFDARTG APGFRAVEVT | |
| | SEDRPFWRKT IEKQSVAREV FDCLDNLVGK GLNGIHLVLP QNGGPLFIAA | |
| | VKEDQPLPAI RQADINAAVN IGLRAIAGPS CYHAHPKVRL IKGESGTDKG | |
| | KWLPRKGKEA NKRENAQFGN VDLDLEVKFN RLDIDSDVLK GDNTNLFHDP | |
| | LNIACYGFAT IQNLQHPFLA HASAVFSRQK GAVARLQWEV CRAINSRRLE | |
| | AWQKKAEKAA VKR | |
| Phycisphaerae | MATKSYRARI LTDSRLAAAL DRTHVVFVES LKQMINTYLR MQNGKFGPDH | (SEQ |
| bacterium ST- | KKLAQIMLSR SNTFAHGVMD QITRDQPTST LDEEWTDLAR RIHKTTGPLF | ID NO: |
| NAGAB-D1 | LQAERFATVK NRAIHTKSRG KVIPSPETLA VPAKFWHQVC DSASAYIRSN | 180) |
| (transposase) | RELMQQWRKD RAAWLKDKNE WQQKHPEFMQ FYNGPYQNFL KLCDDDRITS | |
| AQT69685.1 | QLAAEQQPTA SKNNRPRKTG KRFARWHLWY KWLSENPEII EWRNKASASD | |
| | FKTVTDDVRK QIITKYPQQN KYITRLLDWL EDNNPELKTL ENLRRTYVKK | |
| | FDSFKRPPTL TLPSPYRHPY WFTMELDQFY KKADFENGTI QLLLIDEDDD | |
| | GNWFFNWMPA SLKPDPRLVP SWRAETFETE GRFPPYLGGK IGKKLSRPAP | |
| | TDAERKAGIA GAKLMIKNNR SELLFTVFEQ DCPPRVKWAK TKNRKCPADN | |
| | AFSSDGKTRK PLRILSIDLG IRHIGAFALT QGTRNDSAWQ TESLKKGIIN | |
| | SPSIPPLRQV RRHDYDLKRK RRRHGKPVKG QRSNANLQAH RTNMAQDRFK | |
| | KGASAIVSLA REHSADLILF ENLHSLKFSA FDERWMNRQL RDMNRRHIVE | |
| | LVSEQAPEFG ITVKDDINPW MTSRICSNQN LPGFRFSMKK KNPYREKLPR | |
| | EKCTDFGYPV WEPGGHLFRC PHCDHRVNAD INAAANLANK FFGLGYWNNG | |
| | LKYDAETKTF TVHTDKKTPP LIFKPRPQFD LWADSVKTRK QLGPDPF | |
| Planctomycetes | MSVRSFQARV ECDKQTMEHL WRTHKVFNER LPEIIKILFK MKRGECGQND | (SEQ |
| bacterium | KQKSLYKSIS QSILEANAQN ADYLLNSVSI KGWKPGTAKK YRNASFTWAD | ID NO: |
| RBG_13_46_10 | DAAKLSSQGI HVYDKKQVLG DLPGMMSQMV CRQSVEAISG HIELTKKWEK | 181) |
| OHB62175.1 | EHNEWLKEKE KWESEDEHKK YLDLREKFEQ FEQSIGGKIT KRRGRWHLYL | |
| | KWLSDNPDFA AWRGNKAVIN PLSEKAQIRI NKAKPNKKNS VERDEFFKAN | |
| | PEMKALDNLH GYYERNFVRR RKTKKNPDGF DHKPTFTLPH PTIHPRWFVF | |
| | NKPKTNPEGY RKLILPKKAG DLGSLEMRLL TGEKNKGNYP DDWISVKFKA | |
| | DPRLSLIRPV KGRRVVRKGK EQGQTKETDS YEFFDKHLKK WRPAKLSGVK | |
| | LIFPDKTPKA AYLYFTCDIP DEPLTETAKK IQWLETGDVT KKGKKRKKKV | |
| | LPHGLVSCAV DLSMRRGTTG FATLCRYENG KIHILRSRNL WVGYKEGKGC | |
| | HPYRWTEGPD LGHIAKHKRE IRILRSKRGK PVKGEESHID LQKHIDYMGE | |
| | DRFKKAARTI VNFALNTENA ASKNGFYPRA DVLLLENLEG LIPDAEKERG | |
| | INRALAGWNR RHLVERVIEM AKDAGFKRRV FEIPPYGTSQ VCSKCGALGR | |
| | RYSIIRENNR REIRFGYVEK LFACPNCGYC ANADHNASVN LNRRFLIEDS | |
| | FKSYYDWKRL SEKKQKEEIE TIESKLMDKL CAMHKISRGS ISK | |
| Spirochaetes | MSFTISYPFK LIIKNKDEAK ALLDTHQYMN EGVKYYLEKL LMFRQEKIFI | (SEQ |
| bacterium | GEDETGKRIY IEETEYKKQI EEFYLIKKTE LGRNLTLTLD EFKTLMRELY | ID NO: |
| GWB1_27_13 | ICLVSSSMEN KKGFPNAQQA SLNIFSPLFD AESKGYILKE ENNNISLIHK | 182) |
| OHD16008.1 | DYGKILLKRL RDNNLIPIFT KFTDIKKITA KLSPTALDRM IFAQAIEKLL | |
| | SYESWCKLMI KERFDKEVKI KELENKCENK QERDKIFEIL EKYEEERQKT | |
| | FEQDSGFAKK GKFYITGRML KGFDEIKEKW LKEKDRSEQN LINILNKYQT | |
| | DNSKLVGDRN LFEFIIKLEN QCLWNGDIDY LKIKRDINKN QIWLDRPEMP | |
| | RFTMPDFKKH PLWYRYEDPS NSNFRNYKIE VVKDENYITI PLITERNNEY | |
| | FEENYTFNLA KLKKLSENIT FIPKSKNKEF EFIDSNDEEE DKKDQKKSKQ | |
| | YIKYCDTAKN TSYGKSGGIR LYFNRNELEN YKDGKKMDSY TVFTLSIRDY | |
| | KSLFAKEKLQ PQIFNTVDNK ITSLKIQKKF GNEEQTNFLS YFTQNQITKK | |
| | DWMDEKTFQN VKELNEGIRV LSVDLGQRFF AAVSCFEIMS EIDNNKLFFN | |
| | LNDQNHKIIR INDKNYYAKH IYSKTIKLSG EDDDLYKERK INKNYKLSYQ | |
| | ERKNKIGIFT RQINKLNQLL KIIRNDEIDK EKFKELIETT KRYVKNTYND | |
| | GIIDWNNVDN KILSYENKED VINLHKELDK KLEIDFKEFI RECRKPIFRS | |
| | GGLSMQRIDF LEKLNKLKRK WVARTQKSAE SIVLTPKFGY KLKEHINELK | |
| | DNRVKQGVNY ILMTALGYIK DNEIKNDSKK KQKEDWVKKN RACQIILMEK | |
| | LTEYTFAEDR PREENSKLRM WSHRQIFNFL QQKASLWGIL VGDVFAPYTS | |
| | KCLSDNNAPG IRCHQVTKKD LIDNSWFLKI VVKDDAFCDL IEINKENVKN | |
| | KSIKINDILP LRGGELFASI KDGKLHIVQA DINASRNIAK RFLSQINPFR | |
| | VVLKKDKDET FHLKNEPNYL KNYYSILNFV PTNEELTFFK VEENKDIKPT | |
| | KRIKMDKHEK ESTDEGDDYS KNQIALFRDD SGIFFDKSLW VDGKIFWSVV | |
| | KNKMTKLLRE RNNKKNGSK | |
| Verrucomicrobiaceae | MPLSRIYQGR TNSLIILTPT PQEPWDHKAL ARFDSPLWRH HALFQDAVNY | (SEQ |
| bacterium | YQLCLVALAS SDGTRPLSKL HEQMKASWDE AKTDTEDSWR VRLARRLGIP | ID NO: |
| UBA2429 | AASLFEAALA KVLEGNEAPE RARELAGELL LDKIEGDIQQ AGRGYWPRFC | 183) |
| GCA_002343505.1 | DPKANPTYDY SATARASASG LTKLAAVIHA ENVTEEALKQ VAAEMDLSWT | |
| | VKLQPDKNFV GAEARARLLE AAHHFIKVAE SPPTKLAEVL ARFPDGLALW | |
| | QALPEKIAAL PEETQVPRNR KASPDLTFAT LLFQHFPSLF TAAVLGLSVG | |
| | KPKSVKAPKV VEKVSARRKA NAVTQAVVIE EPEIDFAELG DDPIKLARGE | |
| | RGFVFPAFTS LSFWAVPGPH VPVWKEFDIA AFKEALKTVN QFKLKTSERN | |
| | ALLAEAQRRL DYMDEKTHDW KTGDSDEPGH IPPRLKSDPN FTLIQALTQD | |
| | EGVSNKATGD QHIPKGVYTG GLRGFYAIKK DWCELWERKA DKSQGTPTEE | |
| | ELISIVTDYQ RDHVYDVGDV GLFRALCEPR FWPLWQPLTD EQEAERIKAG | |
| | RAKDMISAYR VWLELQEDVV RLAQPIRFTP AHAENSRRLF MFSDISGSHG | |
| | AEFGSDGKSL EVSIAYDVDG KLQPVRAKLE FSAPRAARDE LEGLSGGSES | |
| | MRWFQPMMKA LDCPEVEMPA LEKCAVSLMP DVVKKGGGKW VRLLLNFPAT | |
| | LEPEGLIRHI GKQAMWYKQF NGTYKPRTQQ LDTGLHLYWP GLEKAPEAED | |
| | AAAWWNREEI RAKGFSVLSV DLGQRDAGAW ALLESRSDKA FSRNRQPFIE | |
| | LGEAGGKLWS TALLGLGMLR LPGEDARTGA LDDQGKRAVE FHGKAGRNAL | |
| | EAEWQEAREM ALLFGGEEAK SRLGPGFDHL SHSKQNEELL RILSRAQSRL | |
| | ARFHRWSCRI HEKPEATGDD VIDYGQVDEL LTKTAEAMLE NLKALYTNAG | |
| | GILDSKSKQP LTLVGLRKKL EAQKVEPEKI AAVLKPHAEI IFQRLGTLIP | |
| | ELKQHLRVSL ERLANRELPL RHREWVWNEA FEKLEQGNFK KEENPKWIRG | |
| | QRGLSMARIE QIENLRKRFM SLRRQMSLIP GEQVKQGVED KGQRQPEPCE | |
| | DILNKLDRMK QQRVNQTAHL ILAQALGLRL RPHLANDAER EEKDIHGEYE | |
| | LIPGRKPVDF IVMEDLSRYL SSQGRAPSEN GRLMKWCHRA VLAKLKQMCE | |
| | PFGIPVLEVP AAYSSRFCAL TGVPGFRAVE VHDGNAEDFR WKRLIKKAEK | |
| | DKSSKDAEAA AMLFDQLHDL NIEAREARKQ DKKLPLRTLF APVAGGPLFI | |
| | PMVGGGPRQA DMNAAINLGL RAIASPTCLR ARPKIRAELK DGKHQAMLGN | |
| | KLEKAAALTL EPPKEPTKEL AAQKRTNFFL DEKFVGKFDT AHVTTSGKKL | |
| | RLSGGMSLWK AIKDGAWQRV KKINDARIAK WKNNPPPEPD PDDEIQF | |
| Alicyclobacillus | MAVKSIKVKL RLSECPDILA GMWQLHRATN AGVRYYTEWV SLMRQEILYS | (SEQ |
| kakegawensis | RGPDGGQQCY MTAEDCQREL LRRLRNRQLH NGRQDQPGTD ADLLAISRRL | ID NO: |
| WP_067936067.1 | YEILVLQSIG KRGDAQQIAS SFLSPLVDPN SKGGRGEAKS GRKPAWQKMR | 184) |
| | DQGDPRWVAA REKYEQRKAV DPSKEILNSL DALGLRPLFA VFTETYRSGV | |
| | DWKPLGKSQG VRTWDRDMFQ QALERLMSWE SWNRRVGEEY | |
| | ARLFQQKMKF | |
| | EQEHFAEQSH LVKLARALEA DMRAASQGFE AKRGTAHQIT RRALRGADRV | |
| | FEIWKSIPEE ALFSQYDEVI RQVQAEKRRD FGSHDLFAKL AEPKYQPLWR | |
| | ADETFLTRYA LYNGVLRDLE KARQFATFTL PDACVNPIWT RFESSQGSNL | |
| | HKYEFLFDHL GPGRHAVRFQ RLLVVESEGA KERDSVVVPV APSGQLDKLV | |
| | LREEEKSSVA LHLHDTARPD GFMAEWAGAK LQYERSTLAR KARRDKQGMR | |
| | SWRRQPSMLM SAAQMLEDAK QAGDVYLNIS VRVKSPSEVR GQRRPPYAAL | |
| | FRIDDKQRRV TVNYNKLSAY LEEHPDKQIP GAPGLLSGLR VMSVDLGLRT | |
| | SASISVFRVA KKEEVEALGD GRPPHYYPIH GTDDLVAVHE RSHLIQMPGE | |
| | TETKQLRKLR EERQAVLRPL FAQLALLRLL VRCGAADERI RTRSWQRLTK | |
| | QGREFTKRLT PSWREALELE LTRLEAYCGR VPDDEWSRIV DRTVIALWRR | |
| | MGKQVRDWRK QVKSGAKVKV KGYQLDVVGG NSLAQIDYLE QQYKFLRRWS | |
| | FFARASGLVV RADRESHFAV ALRQHIENAK RDRLKKLADR ILMEALGYVY | |
| | EASGPREGQW TAQHPPCQLI ILEELSAYRF SDDRPPSENS KLMAWGHRGI | |
| | LEELVNQAQV HDVLVGTVYA AFSSRFDART GAPGVRCRRV PARFVGATVD | |
| | DSLPLWLTEF LDKHRLDKNL LRPDDVIPTG EGEFLVSPCG EEAARVRQVH | |
| | ADINAAQNLQ RRLWQNFDIT ELRLRCDVKM GGEGTVLVPR VNNARAKQLF | |
| | GKKVLVSQDG VTFFERSQTG GKPHSEKQTD LTDKELELIA EADEARAKSV | |
| | VLFRDPSGHI GKGHWIRQRE FWSLVKQRIE SHTAERIRVR GVGSSLD | |
| Bacillus sp._ V3- | MAIRSIKLKM KTNSGTDSIY LRKALWRTHQ LINEGIAYYM NLLTLYRQEA | (SEQ |
| 13 | IGDKTKEAYQ AELINIIRNQ QRNNGSSEEH GSDQEILALL RQLYELIIPS | ID NO: |
| WP_101661451.1 | SIGESGDANQ LGNKFLYPLV DPNSQSGKGT SNAGRKPRWK RLKEEGNPDW | 185) |
| | ELEKKKDEER KAKDPTVKIF DNLNKYGLLP LFPLFTNIQK DIEWLPLGKR | |
| | QSVRKWDKDM FIQAIERLLS WESWNRRVAD EYKQLKEKTE SYYKEHLTGG | |
| | EEWIEKIRKF EKERNMELEK NAFAPNDGYF ITSRQIRGWD RVYEKWSKLP | |
| | ESASPEELWK VVAEQQNKMS EGFGDPKVFS FLANRENRDI WRGHSERIYH | |
| | IAAYNGLQKK LSRTKEQATF TLPDAIEHPL WIRYESPGGT NLNLFKLEEK | |
| | QKKNYYVTLS KIIWPSEEKW IEKENIEIPL APSIQFNRQI KLKQHVKGKQ | |
| | EISFSDYSSR ISLDGVLGGS RIQFNRKYIK NHKELLGEGD IGPVFFNLVV | |
| | DVAPLQETRN GRLQSPIGKA LKVISSDFSK VIDYKPKELM DWMNTGSASN | |
| | SFGVASLLEG MRVMSIDMGQ RTSASVSIFE VVKELPKDQE QKLFYSINDT | |
| | ELFAIHKRSF LLNLPGEVVT KNNKQQRQER RKKRQFVRSQ IRMLANVLRL | |
| | ETKKTPDERK KAIHKLMEIV QSYDSWTASQ KEVWEKELNL LTNMAAFNDE | |
| | IWKESLVELH HRIEPYVGQI VSKWRKGLSE GRKNLAGISM WNIDELEDTR | |
| | RLLISWSKRS RTPGEANRIE TDEPFGSSLL QHIQNVKDDR LKQMANLIIM | |
| | TALGFKYDKE EKDRYKRWKE TYPACQIILF ENLNRYLFNL DRSRRENSRL | |
| | MKWAHRSIPR TVSMQGEMFG LQVGDVRSEY SSRFHAKTGA PGIRCHALTE | |
| | EDLKAGSNTL KRLIEDGFIN ESELAYLKKG DIIPSQGGEL FVTLSKRYKK | |
| | DSDNNELTVI HADINAAQNL QKRFWQQNSE VYRVPCQLAR MGEDKLYIPK | |
| | SQTETIKKYF GKGSFVKNNT EQEVYKWEKS EKMKIKTDTT FDLQDLDGFE | |
| | DISKTIELAQ EQQKKYLTMF RDPSGYFFNN ETWRPQKEYW SIVNNIIKSC | |
| | LKKKILSNKV EL | |
| Desulfatirhabdium | MPLSNNPPVT QRAYTLRLRG ADPSDLSWRE ALWHTHEAVN KGAKVFGDWL | (SEQ |
| butyrativorans | LTLRGGLDHT LADTKVKGGK GKPDRDPTPE ERKARRILLA LSWLSVESKL | ID NO: |
| WP_028326052.1 | GAPSSYIVAS GDEPAKDRND NVVSALEEIL QSRKVAKSEI DDWKRDCSAS | 186) |
| | LSAAIRDDAV WVNRSKVFDE AVKSVGSSLT REEAWDMLER FFGSRDAYLT | |
| | PMKDPEDKSS ETEQEDKAKD LVQKAGQWLS SRYGTSEGAD FQRMSDIYGK | |
| | IAAWADNASQ GGSSTVDDLV SELRQHFDTK ESKATNGLDW IIGLSSYTGH | |
| | TPNPVHELLR QNTSLNKSHL DDLKKKANTR AESCKSKIGS KGQRPYSDAI | |
| | LNDVESVCGF TYRVDKDGQP VSVADYSKYD VDYKWGTARH YIFAVMLDHA | |
| | ARRISLAHKW IKRAEAERHK FEEDAKRIAN VPARAREWLD SFCKERSVTS | |
| | GAVEPYRIRR RAVDGWKEVV AAWSKSDCKS TEDRIAAARA LQDDSEIDKF | |
| | GDIQLFEALA EDDALCVWHK DGEATNEPDF QPLIDYSLAI EAEFKKRQFK | |
| | VPAYRHPDEL LHPVFCDFGK SRWKINYDVH KNVQAPFYRG LCLTLWTGSE | |
| | IKPVPLCWQS KRLTRDLALG NNHRNDAASA VTRADRLGRA ASNVTKSDMV | |
| | NITGLFEQAD WNGRLQAPRQ QLEAIAVVRD NPRLSEQERN LRMCGMIEHI | |
| | RWLVTFSVKL QPQGPWCAYA EQHGLNTNPQ YWPHADTNRD RKVHARLILP | |
| | RLPGLRVLSV DLGHRYAAAC AVWEAVNTET VKEACQNVGR DMPKEHDLYL | |
| | HIKVKKQGIG KQTEVDKTTI YRRIGADTLP DGRPHPAPWA RLDRQFLIKL | |
| | QGEEKDAREA SNEEIWALHQ MECKLDRTKP LIDRLIASGW GLLKRQMARL | |
| | DALKELGWIP APDSSENLSR EDGEAKDYRE SLAVDDLMFS AVRTLRLALQ | |
| | RHGNRARIAY YLISEVKIRP GGIQEKLDEN GRIDLLQDAL ALWHELFSSP | |
| | GWRDEAAKQL WDSRIATLAG YKAPEENGDN VSDVAYRKKQ QVYREQLRNV | |
| | AKTLSGDVIT CKELSDAWKE RWEDEDQRWK KLLRWFKDWV LPSGTQANNA | |
| | TIRNVGGLSL SRLATITEFR RKVQVGFFTR LRPDGTRHEI GEQFGQKTLD | |
| | ALELLREQRV KQLASRIAEA ALGIGSEGGK GWDGGKRPRQ RINDSRFAPC | |
| | HAVVIENLAN YRPDETRTRL ENRRLMTWSA SKVHKYLSEA CQLNGLYLCT | |
| | VSAWYTSRQD SRTGAPGIRC QDVSVREFMQ SPFWRKQVKQ AEAKHDENKG | |
| | DARERFLCEL NKTWKAKTPA EWKKAGFVRI PLRGGEIFVS ADSKSPSAKG | |
| | IHADLNAAAN IGLRALTDPD WPGKWWYVPC DPVSFESKMD YVKGCAAVKV | |
| | GQPLRQPAQT NADGAASKIR KGKKNRTAGT SKEKVYLWRD ISAFPLESNE | |
| | IGEWKETSAY QNDVQYRVIR MLKEHIKSLD NRTGDNVEG | |
| Desulfonatronum | MVLGRKDDTA ELRRALWTTH EHVNLAVAEV ERVLLRCRGR SYWTLDRRGD | (SEQ |
| thiodismutans | PVHVPESQVA EDALAMAREA QRRNGWPVVG EDEEILLALR YLYEQIVPSC | ID NO: |
| WP_031386437.1 | LLDDLGKPLK GDAQKIGTNY AGPLFDSDTC RRDEGKDVAC CGPFHEVAGK | 187) |
| | YLGALPEWAT PISKQEFDGK DASHLRFKAT GGDDAFFRVS IEKANAWYED | |
| | PANQDALKNK AYNKDDWKKE KDKGISSWAV KYIQKQLQLG QDPRTEVRRK | |
| | LWLELGLLPL FIPVFDKTMV GNLWNRLAVR LALAHLLSWE SWNHRAVQDQ | |
| | ALARAKRDEL AALFLGMEDG FAGLREYELR RNESIKQHAF EPVDRPYVVS | |
| | GRALRSWTRV REEWLRHGDT QESRKNICNR LQDRLRGKFG DPDVFHWLAE | |
| | DGQEALWKER DCVTSFSLLN DADGLLEKRK GYALMTFADA RLHPRWAMYE | |
| | APGGSNLRTY QIRKTENGLW ADVVLLSPRN ESAAVEEKTF NVRLAPSGQL | |
| | SNVSFDQIQK GSKMVGRCRY QSANQQFEGL LGGAEILFDR KRIANEQHGA | |
| | TDLASKPGHV WFKLTLDVRP QAPQGWLDGK GRPALPPEAK HFKTALSNKS | |
| | KFADQVRPGL RVLSVDLGVR SFAACSVFEL VRGGPDQGTY FPAADGRTVD | |
| | DPEKLWAKHE RSFKITLPGE NPSRKEEIAR RAAMEELRSL NGDIRRLKAI | |
| | LRLSVLQEDD PRTEHLRLFM EAIVDDPAKS ALNAELFKGF GDDRFRSTPD | |
| | LWKQHCHFFH DKAEKWVAER FSRWRTETRP KSSSWQDWRE | |
| | RRGYAGGKSY | |
| | WAVTYLEAVR GLILRWNMRG RTYGEVNRQD KKQFGTVASA LLHHINQLKE | |
| | DRIKTGADMI IQAARGFVPR KNGAGWVQVH EPCRLILFED LARYRFRTDR | |
| | SRRENSRLMR WSHREIVNEV GMQGELYGLH VDTTEAGFSS RYLASSGAPG | |
| | VRCRHLVEED FHDGLPGMHL VGELDWLLPK DKDRTANEAR RLLGGMVRPG | |
| | MLVPWDGGEL FATLNAASQL HVIHADINAA QNLQRRFWGR CGEAIRIVCN | |
| | QLSVDGSTRY EMAKAPKARL LGALQQLKNG DAPFHLTSIP NSQKPENSYV | |
| | MTPTNAGKKY RAGPGEKSSG EEDELALDIV EQAEELAQGR KTFFRDPSGV | |
| | FFAPDRWLPS EIYWSRIRRR IWQVTLERNS SGRQERAEMD EMPY | |
| Lentisphaeria | MAVELNRIYQ GRVNHVYIFD ENQNQVSVDN GDDLLFVHHE LYQDAINYYL | (SEQ |
| bacterium | VALAAMALDS KDSLFGKFKM QIRAVWNDFY RNGQLRPGLK HSLIRSLGHA | ID NO: |
| DCFZ01000012.1 | AELNTSNGAD IAMNLILEDG GIPSEILNAA LEHLAEKCTG DVSQLGKTFF | 188) |
| | PRFCDTAYHG NWDVDAKSFS EKKGRQRLVD ALYSLHPVQA VQELAPEIEI | |
| | GWGGVKTQTG KFFTGDEAKA SLKKAISYFL QDTGKNSPEL QEYFSVAGKQ | |
| | PLEQYLGKID TFPEISFGRI SSHQNINISN AMWILKFFPD QYSVDLIKNL | |
| | IPNKKYEIGI APQWGDDPVK LSRGKRGYTF RAFTDLAMWE KNWKVFDRAA | |
| | FSDALKTINQ FRNKTQERND QLKRYCAALN WMDGESSDKK PPVEPADADA | |
| | VDEAATSVLP ILAGDKRWNA LLQLQKELGI CNDFTENELM DYGLSLRTIR | |
| | GYQKLRSMML EKEEKMRAKT ADDEEISQAL QEIIIKFQSS HRDTIGSVSL | |
| | FLKLAEPKYF CVWHDADKNQ NFASVDMVAD AVRYYSYQEE KARLEEPIQI | |
| | TPADARYSRR VSDLYALVYK NAKECKTGYG LRPDGNFVFE IAQKNAKGYA | |
| | PAKWVLAFSA PRLKRDGLID KEFSAYYPPV LQAFLREEEA PKQSFKTTAV | |
| | ILMPDWDKNG KRRILLNFPI KLDVSAIHQK TDHRFENQFY FANNTNTCLL | |
| | WPSYQYKKPV TWYQGKKPFD VVAVDLGQRS AGAVSRITVS TEKREHSVAI | |
| | GEAGGTQWYA YRKESGLLRL PGEDATVIRD GQRTEELSGN AGRLSTEEET | |
| | VQACVLCKML IGDATLLGGS DEKTIRSFPK QNDKLLIAFR RATGRMKQLQ | |
| | RWLWMLNENG LCDKAKTEIS NSDWLVNKNI DNVLKEEKQH REMLPAILLQ | |
| | IADRVLPLRG RKWDWVLNPQ SNSFVLQQTA HGSGDPHKKI CGQRGLSFAR | |
| | IEQLESLRMR CQALNRILMR KTGEKPATLA EMRNNPIPDC CPDILMRLDA | |
| | MKEQRINQTA NLILAQALGL RHCLHSESAT KRKENGMHGE YEKIPGVEPA | |
| | AFVVLEDLSR YRFSQDRSSY ENSRLMKWSH RKILEKLALL CEVFNVPILQ | |
| | VGAAYSSKFS ANAIPGFRAE ECSIDQLSFY PWRELKDSRE KALVEQIRKI | |
| | GHRLLTFDAK ATIIMPRNGG PVFIPFVPSD SKDTLIQADI NASFNIGLRG | |
| | VADATNLLCN NRVSCDRKKD CWQVKRSSNF SKMVYPEKLS LSFDPIKKQE | |
| | GAGGNFFVLG CSERILTGTS EKSPVFTSSE MAKKYPNLMF GSALWRNEIL | |
| | KLERCCKINQ SRLDKFIAKK EVQNEL | |
| Laceyella | MSIRSFKLKI KTKSGVNAEE LRRGLWRTHQ LINDGIAYYM NWLVLLRQED | (SEQ |
| sediminis | LFIRNEETNE IEKRSKEEIQ GELLERVHKQ QQRNQWSGEV DDQTLLQTLR | ID NO: |
| WP_106341859.1 | HLYEEIVPSV IGKSGNASLK ARFFLGPLVD PNNKTTKDVS KSGPTPKWKK | 189) |
| | MKDAGDPNWV QEYEKYMAER QTLVRLEEMG LIPLFPMYTD EVGDIHWLPQ | |
| | ASGYTRTWDR DMFQQAIERL LSWESWNRRV RERRAQFEKK THDFASRFSE | |
| | SDVQWMNKLR EYEAQQEKSL EENAFAPNEP YALTKKALRG WERVYHSWMR | |
| | LDSAASEEAY WQEVATCQTA MRGEFGDPAI YQFLAQKENH DIWRGYPERV | |
| | IDFAELNHLQ RELRRAKEDA TFTLPDSVDH PLWVRYEAPG GTNIHGYDLV | |
| | QDTKRNLTLI LDKFILPDEN GSWHEVKKVP FSLAKSKQFH RQVWLQEEQK | |
| | QKKREVVFYD YSTNLPHLGT LAGAKLQWDR NFLNKRTQQQ IEETGEIGKV | |
| | FFNISVDVRP AVEVKNGRLQ NGLGKALTVL THPDGTKIVT GWKAEQLEKW | |
| | VGESGRVSSL GLDSLSEGLR VMSIDLGQRT SATVSVFEIT KEAPDNPYKF | |
| | FYQLEGTELF AVHQRSFLLA LPGENPPQKI KQMREIRWKE RNRIKQQVDQ | |
| | LSAILRLHKK VNEDERIQAI DKLLQKVASW QLNEEIATAW NQALSQLYSK | |
| | AKENDLQWNQ AIKNAHHQLE PVVGKQISLW RKDLSTGRQG IAGLSLWSIE | |
| | ELEATKKLLT RWSKRSREPG VVKRIERFET FAKQIQHHIN QVKENRLKQL | |
| | ANLIVMTALG YKYDQEQKKW IEVYPACQWV LFENLRSYRF SYERSRRENK | |
| | KLMEWSHRSI PKLVQMQGEL FGLQVADVYA AYSSRYHGRT GAPGIRCHAL | |
| | TEADLRNETN IIHELIEAGF IKEEHRPYLQ QGDLVPWSGG ELFATLQKPY | |
| | DNPRILTLHA DINAAQNIQK RFWHPSMWFR VNCESVMEGE IVTYVPKNKT | |
| | VHKKQGKTFR FVKVEGSDVY EWAKWSKNRN KNTFSSITER KPPSSMILFR | |
| | DPSGTFFKEQ EWVEQKTFWG KVQSMIQAYM KKTIVQRMEE | |
| Methylobacterium | MYEAIVLADD ANAQLANAFL GPLTDPNSAG FLEAFNKVDR PAPSWLDQVP | (SEQ |
| nodulans (long | ASDPIDPAVL AEANAWLDTD AGRAWLVDTG APPRWRSLAA KQDPIWPREF | ID NO: |
| form) | ARKLGELRKE AASGTSAIIK ALKRDFGVLP LFQPSLAPRI LGSRSSLTPW | 190) |
| | DRLAFRLAVG HLLSWESWCT RARDEHTARV QRLEQFSSAH LKGDLATKVS | |
| | TLREYERARK EQIAQLGLPM GERDFLITVR MTRGWDDLRE KWRRSGDKGQ | |
| | EALHAIIATE QTRKRGRFGD PDLFRWLARP ENHHVWADGH ADAVGVLARV | |
| | NAMERLVERS RDTALMTLPD PVAHPRSAQW EAEGGSNLRN YQLEAVGGEL | |
| | QITLPLLKAA DDGRCIDTPL SFSLAPSDQL QGVVLTKQDK QQKITYCTNM | |
| | NEVFEAKLGS ADLLLNWDHL RGRIRDRVDA GDIGSAFLKL ALDVAHVLPD | |
| | GVDDQLARAA FHFQSAKGAK SKHADSVQAG LRVLSIDLGV RSFATCSVFE | |
| | LKDTAPTTGV AFPLAEFRLW AVHERSFTLE LPGENVGAAG QQWRAQADAE | |
| | LRQLRGGLNR HRQLLRAATV QKGERDAYLT DLREAWSAKE LWPFEASLLS | |
| | ELERCSTVAD PLWQDTCKRA ARLYRTEFGA VVSEWRSRTR SREDRKYAGK | |
| | SMWSVQHLTD VRRFLQSWSL AGRASGDIRR LDRERGGVFA KDLLDHIDAL | |
| | KDDRLKTGAD LIVQAARGFQ RNEFGYWVQK HAPCHVILFE DLSRYRMRTD | |
| | RPRRENSQLM QWAHRGVPDM VGMQGEIYGI QDRRDPDSAR KHARQPLAAF | |
| | CLDTPAAFSS RYHASTMTPG IRCHPLRKRE FEDQGFLELL KRENEGLDLN | |
| | GYKPGDLVPL PGGEVFVCLN ANGLSRIHAD INAAQNLQRR FWTQHGDAFR | |
| | LPCGKSAVQG QIRWAPLSMG KRQAGALGGF GYLEPTGHDS GSCQWRKTTE | |
| | AEWRRLSGAQ KDRDEAAAAE DEELQGLEEE LLERSGERVV FFRDPSGVVL | |
| | PTDLWFPSAA FWSIVRAKTV GRLRSHLDAQ AEASYAVAAG L | |
| Opitutaceae | MSLNRIYQGR VAAVETGTAL AKGNVEWMPA AGGDEVLWQH HELFQAAINY | (SEQ |
| bacterium | YLVALLALAD KNNPVLGPLI SQMDNPQSPY HVWGSFRRQG RQRTGLSQAV | ID NO: |
| WP_009513281.1 | APYITPGNNA PTLDEVFRSI LAGNPTDRAT LDAALMQLLK ACDGAGAIQQ | 191) |
| | EGRSYWPKFC DPDSTANFAG DPAMLRREQH RLLLPQVLHD PAITHDSPAL | |
| | GSFDTYSIAT PDTRTPQLTG PKARARLEQA ITLWRVRLPE SAADFDRLAS | |
| | SLKKIPDDDS RLNLQGYVGS SAKGEVQARL FALLLFRHLE RSSFTLGLLR | |
| | SATPPPKNAE TPPPAGVPLP AASAADPVRI ARGKRSFVFR AFTSLPCWHG | |
| | GDNIHPTWKS FDIAAFKYAL TVINQIEEKT KERQKECAEL ETDFDYMHGR | |
| | LAKIPVKYTT GEAEPPPILA NDLRIPLLRE LLQNIKVDTA LTDGEAVSYG | |
| | LQRRTIRGFR ELRRIWRGHA PAGTVFSSEL KEKLAGELRQ FQTDNSTTIG | |
| | SVQLFNELIQ NPKYWPIWQA PDVETARQWA DAGFADDPLA ALVQEAELQE | |
| | DIDALKAPVK LTPADPEYSR RQYDFNAVSK FGAGSRSANR HEPGQTERGH | |
| | NTFTTEIAAR NAADGNRWRA THVRIHYSAP RLLRDGLRRP DTDGNEALEA | |
| | VPWLQPMMEA LAPLPTLPQD LTGMPVFLMP DVTLSGERRI LLNLPVTLEP | |
| | AALVEQLGNA GRWQNQFFGS REDPFALRWP ADGAVKTAKG KTHIPWHQDR | |
| | DHFTVLGVDL GTRDAGALAL LNVTAQKPAK PVHRIIGEAD GRTWYASLAD | |
| | ARMIRLPGED ARLFVRGKLV QEPYGERGRN ASLLEWEDAR NIILRLGQNP | |
| | DELLGADPRR HSYPEINDKL LVALRRAQAR LARLQNRSWR LRDLAESDKA | |
| | LDEIHAERAG EKPSPLPPLA RDDAIKSTDE ALLSQRDIIR RSFVQIANLI | |
| | LPLRGRRWEW RPHVEVPDCH ILAQSDPGTD DTKRLVAGQR GISHERIEQI | |
| | EELRRRCQSL NRALRHKPGE RPVLGRPAKG EEIADPCPAL LEKINRLRDQ | |
| | RVDQTAHAIL AAALGVRLRA PSKDRAERRH RDIHGEYERF RAPADFVVIE | |
| | NLSRYLSSQD RARSENTRLM QWCHRQIVQK LRQLCETYGI PVLAVPAAYS | |
| | SRFSSRDGSA GFRAVHLTPD HRHRMPWSRI LARLKAHEED GKRLEKTVLD | |
| | EARAVRGLFD RLDRFNAGHV PGKPWRTLLA PLPGGPVFVP LGDATPMQAD | |
| | LNAAINIALR GIAAPDRHDI HHRLRAENKK RILSLRLGTQ REKARWPGGA | |
| | PAVTLSTPNN GASPEDSDAL PERVSNLFVD IAGVANFERV TIEGVSQKFA | |
| | TGRGLWASVK QRAWNRVARL NETVTDNNRN EEEDDIPM | |
| Thermomonas | MSEKTTQRAY TLRLNRASGE CAVCQNNSCD CWHDALWATH KAVNRGAKAF | (SEQ |
| hydrothermalis | GDWLLTLRGG LCHTLVEMEV PAKGNNPPQR PTDQERRDRR VLLALSWLSV | ID NO: |
| WP_072754838.1 | EDEHGAPKEF IVATGRDSAD DRAKKVEEKL REILEKRDFQ EHEIDAWLQD | 192) |
| | CGPSLKAHIR EDAVWVNRRA LFDAAVERIK TLTWEEAWDF LEPFFGTQYF | |
| | AGIGDGKDKD DAEGPARQGE KAKDLVQKAG QWLSARFGIG TGADFMSMAE | |
| | AYEKIAKWAS QAQNGDNGKA TIEKLACALR PSEPPTLDTV LKCISGPGHK | |
| | SATREYLKTL DKKSTVTQED LNQLRKLADE DARNCRKKVG KKGKKPWADE | |
| | VLKDVENSCE LTYLQDNSPA RHREFSVMLD HAARRVSMAH SWIKKAEQRR | |
| | RQFESDAQKL KNLQERAPSA VEWLDRFCES RSMTTGANTG SGYRIRKRAI | |
| | EGWSYVVQAW AEASCDTEDK RIAAARKVQA DPEIEKFGDI QLFEALAADE | |
| | AICVWRDQEG TQNPSILIDY VTGKTAEHNQ KRFKVPAYRH PDELRHPVFC | |
| | DFGNSRWSIQ FAIHKEIRDR DKGAKQDTRQ LQNRHGLKMR LWNGRSMTDV | |
| | NLHWSSKRLT ADLALDQNPN PNPTEVTRAD RLGRAASSAF DHVKIKNVFN | |
| | EKEWNGRLQA PRAELDRIAK LEEQGKTEQA EKLRKRLRWY VSFSPCLSPS | |
| | GPFIVYAGQH NIQPKRSGQY APHAQANKGR ARLAQLILSR LPDLRILSVD | |
| | LGHRFAAACA VWETLSSDAF RREIQGLNVL AGGSGEGDLF LHVEMTGDDG | |
| | KRRTVVYRRI GPDQLLDNTP HPAPWARLDR QFLIKLQGED EGVREASNEE | |
| | LWTVHKLEVE VGRTVPLIDR MVRSGFGKTE KQKERLKKLR ELGWISAMPN | |
| | EPSAETDEKE GEIRSISRSV DELMSSALGT LRLALKRHGN RARIAFAMTA | |
| | DYKPMPGGQK YYFHEAKEAS KNDDETKRRD NQIEFLQDAL SLWHDLFSSP | |
| | DWEDNEAKKL WQNHIATLPN YQTPEEISAE LKRVERNKKR KENRDKLRTA | |
| | AKALAENDQL RQHLHDTWKE RWESDDQQWK ERLRSLKDWI FPRGKAEDNP | |
| | SIRHVGGLSI TRINTISGLY QILKAFKMRP EPDDLRKNIP QKGDDELENF | |
| | NRRLLEARDR LREQRVKQLA SRIIEAALGV GRIKIPKNGK LPKRPRTTVD | |
| | TPCHAWVIES LKTYRPDDLR TRRENRQLMQ WSSAKVRKYL KEGCELYGLH | |
| | FLEVPANYTS RQCSRTGLPG IRCDDVPTGD FLKAPWWRRA INTAREKNGG | |
| | DAKDRFLVDL YDHLNNLQSK GEALPATVRV PRQGGNLFIA GAQLDDTNKE | |
| | RRAIQADLNA AANIGLRALL DPDWRGRWWY VPCKDGTSEP ALDRIEGSTA | |
| | FNDVRSLPTG DNSSRRAPRE IENLWRDPSG DSLESGTWSP TRAYWDTVQS | |
| | RVIELLRRHA GLPTS | |
| Methylobacterium | MYEAIVLADD ANAQLANAFL GPLTDPNSAG FLEAFNKVDR PAPSWLDQVP | (SEQ |
| nodulans | ASDPIDPAVL AEANAWLDTD AGRAWLVDTG APPRWRSLAA KQDPIWPREF | ID NO: |
| WP_043747912.1 | ARKLGELRKE AASGTSAIIK ALKRDFGVLP LFQPSLAPRI LGSRSSLTPW | 193) |
| | DRLAFRLAVG HLLSWESWCT RARDEHTARV QRLEQFSSAH LKGDLATKVS | |
| | TLREYERARK EQIAQLGLPM GERDFLITVR MTRGWDDLRE KWRRSGDKGQ | |
| | EALHAIIATE QTRKRGRFGD PDLFRWLARP ENHHVWADGH ADAVGVLARV | |
| | NAMERLVERS RDTALMTLPD PVAHPRSAQW EAEGGSNLRN YQLEAVGGEL | |
| | QITLPLLKAA DDGRCIDTPL | |
| Chloracidobacterium | MPQQAKPPVT QRAYTLRLRG ADSNDPSWRD ALWQTHEAVN | (SEQ |
| thermophilum | RGAQAFGDWL | ID NO: |
| WP_058868187.1 | LTLRGGLDHT LADTPVKGGK GKPDPDPTDE ERKARRILLA LSWLSVESKL | 194) |
| | GAPAGLIIAF GTEAAEERNR KWVAALEEIL KSRGVDQNEI NAWKKDCSAS | |
| | LSAAIRDDAV WVNRSKAFDE AVESIGSSGS SGSSLTREEP WDMLERFFGS | |
| | RDAYLAPAKG SEDESSEAKQ EDQAKDLVQK AGQWLSSRFG TGKGADFRRM | |
| | ATVYEAIAKW DGKASLEMAG DKAIADLATA LSEFNPASND LQGVLGLISG | |
| | PGYKSATRNF LNQLAAQTTV TQQDFVSLKD KANNDAQECK QNTGSKGQRP | |
| | YSNSILEKVE SVCGFTYLQD GGPARHSEFA VILDHAARRV SLAHTWIKLA | |
| | EAERRKFEED AKKIDQVPEA AKDWLDRFCL ERSGVSGALE PYRIRRRAVD | |
| | GWKEVVAEWS KSDCKTVEDR IAAARALQDD PEIDKFGDIQ LFEALAEDDA | |
| | VCVWHKDGDA AKAPDPQPLI DYALAAEAEF KKRHFKVPAY RHPDALLHPI | |
| | FCDFGKSRWD ICFDVHKNMQ TPFPRALCLT LWTGSEMKRI PLCWQSKRLA | |
| | RDLALGNNTG DAGASEVTRA DRLGRAASRA ASNVTKSDVV NIAGLFEQAD | |
| | WNGRLQAPRQ QLEAIARYVE KHDWDQKAEK MRNAIQWLVT FSARLQPQGP | |
| | WCAYAKIHGL KEDPQYWPHA DTNKNRKGHA RLILSRLPGL RVLAVDLGHR | |
| | YAAACAVWEA LSTEAFQREI KGRTILRGRT DGNALYCHTR HKANGKERVT | |
| | IYRRIGADTL PDGKPHPAPW ARLDRQFLIK LQGEEEGVRE ASNEEIWAVH | |
| | QLEAALGRPV SLIDRLVASG WGGSDKQKAR LEGLKQLGWD PADKPSLSVD | |
| | ELMSSAVRTM RLALKRHGDR ARIAHYLITD EKTTPGGIKE TLDEKGRIDL | |
| | LQDALVLWHD LFSSRGWRDD TAKQLWNAHV AKLHGYKAPE EPGEDSSGAE | |
| | RKKKQRENRE KLYDVAKALA QDVTLREALH DAWKKRWEND DERWKKQLRW | |
| | FKDWVFPRGN HASDPTIRKR QLINPSGGNG RRGNHASDPT IRKRQLINPS | |
| | GGNGRRGNHA SDPTIRKVGG LSLPRLATLT EFRRKVQVGF FTRLKPDGTR | |
| | AETKEQFGQS ALDALEHLRE QRVKQLASRI AEAALGVGRV RRPVEGKDPK | |
| | RPDVRVDEPC HAIVIEDLTH YRPEETRTRR ENRQLMTWSS SKVKKYLAEA | |
| | CQLHGLHLRE VSASYTSRQD SRTGAPGVRC QDVPVKEFMR SPFWRKQVKQ | |
| | AEAKQAANKG DARERLLCDL NARWKDRTAA DWEKAGAVRI PLQGGEIFVS | |
| | ADANSPAAKG IQADLNAAAN IGLRALTDPD WAGKWWYVPC DPASFRPVRD | |
| | KVDGSAVVNP DQPLRQSAQA QSGDAAKDKN GNKGAGKSKE VVNLWRDISS | |
| | SPLECIEFGE WKEYAAYQNE VQCRVIRILK EQIKGRDKQP HEGSKEDDIP | |
| | L | |
| Desulfovibrio | MPTRTINLKL VLGKNPENAT LRRALFSTHR LVNQATKRIE EFLLLCRGEA | (SEQ |
| inopinatus | YRTVDNEGKE AEIPRHAVQE EALAFAKAAQ RHNGCISTYE DQEILDVLRQ | ID NO: |
| WP_027186183.1 | LYERLVPSVN ENNEAGDAQA ANAWVSPLMS AESEGGLSVY DKVLDPPPVW | 195) |
| | MKLKEEKAPG WEAASQIWIQ SDEGQSLLNK PGSPPRWIRK LRSGQPWQDD | |
| | FVSDQKKKQD ELTKGNAPLI KQLKEMGLLP LVNPFFRHLL DPEGKGVSPW | |
| | DRLAVRAAVA HFISWESWNH RTRAEYNSLK LRRDEFEAAS DEFKDDFTLL | |
| | RQYEAKRHST LKSIALADDS NPYRIGVRSL RAWNRVREEW IDKGATEEQR | |
| | VTILSKLQTQ LRGKFGDPDL FNWLAQDRHV HLWSPRDSVT PLVRINAVDK | |
| | VLRRRKPYAL MTFAHPRFHP RWILYEAPGG SNLRQYALDC TENALHITLP | |
| | LLVDDAHGTW IEKKIRVPLA PSGQIQDLTL EKLEKKKNRL YYRSGFQQFA | |
| | GLAGGAEVLF HRPYMEHDER SEESLLERPG AVWFKLTLDV ATQAPPNWLD | |
| | GKGRVRTPPE VHHFKTALSN KSKHTRTLQP GLRVLSVDLG MRTFASCSVF | |
| | ELIEGKPETG RAFPVADERS MDSPNKLWAK HERSFKLTLP GETPSRKEEE | |
| | ERSIARAEIY ALKRDIQRLK SLLRLGEEDN DNRRDALLEQ FFKGWGEEDV | |
| | VPGQAFPRSL FQGLGAAPFR STPELWRQHC QTYYDKAEAC LAKHISDWRK | |
| | RTRPRPTSRE MWYKTRSYHG GKSIWMLEYL DAVRKLLLSW SLRGRTYGAI | |
| | NRQDTARFGS LASRLLHHIN SLKEDRIKTG ADSIVQAARG YIPLPHGKGW | |
| | EQRYEPCQLI LFEDLARYRF RVDRPRRENS QLMQWNHRAI VAETTMQAEL | |
| | YGQIVENTAA GFSSRFHAAT GAPGVRCRFL LERDFDNDLP KPYLLRELSW | |
| | MLGNTKVESE EEKLRLLSEK IRPGSLVPWD GGEQFATLHP KRQTLCVIHA | |
| | DMNAAQNLQR RFFGRCGEAF RLVCQPHGDD VLRLASTPGA RLLGALQQLE | |
| | NGQGAFELVR DMGSTSQMNR FVMKSLGKKK IKPLQDNNGD DELEDVLSVL | |
| | PEEDDTGRIT VFRDSSGIFF PCNVWIPAKQ FWPAVRAMIW KVMASHSLG | |
| Desulfonatronum | MVLGRKDDTA ELRRALWTTH EHVNLAVAEV ERVLLRCRGR SYWTLDRRGD | (SEQ |
| thiodismutans | PVHVPESQVA EDALAMAREA QRRNGWPVVG EDEEILLALR YLYEQIVPSC | ID NO: |
| WP_031386437.1 | LLDDLGKPLK GDAQKIGTNY AGPLFDSDTC RRDEGKDVAC CGPFHEVAGK | 187) |
| | YLGALPEWAT PISKQEFDGK DASHLRFKAT GGDDAFFRVS IEKANAWYED | |
| | PANQDALKNK AYNKDDWKKE KDKGISSWAV KYIQKQLQLG QDPRTEVRRK | |
| | LWLELGLLPL FIPVFDKTMV GNLWNRLAVR LALAHLLSWE SWNHRAVQDQ | |
| | ALARAKRDEL AALFLGMEDG FAGLREYELR RNESIKQHAF EPVDRPYVVS | |
| | GRALRSWTRV REEWLRHGDT QESRKNICNR LQDRLRGKFG DPDVFHWLAE | |
| | DGQEALWKER DCVTSFSLLN DADGLLEKRK GYALMTFADA RLHPRWAMYE | |
| | APGGSNLRTY QIRKTENGLW ADVVLLSPRN ESAAVEEKTF NVRLAPSGQL | |
| | SNVSFDQIQK GSKMVGRCRY QSANQQFEGL LGGAEILFDR KRIANEQHGA | |
| | TDLASKPGHV WFKLTLDVRP QAPQGWLDGK GRPALPPEAK HFKTALSNKS | |
| | KFADQVRPGL RVLSVDLGVR SFAACSVFEL VRGGPDQGTY FPAADGRTVD | |
| | DPEKLWAKHE RSFKITLPGE NPSRKEEIAR RAAMEELRSL NGDIRRLKAI | |
| | LRLSVLQEDD PRTEHLRLFM EAIVDDPAKS ALNAELFKGF GDDRFRSTPD | |
| | LWKQHCHFFH DKAEKVVAER FSRWRTETRP KSSSWQDWRE | |
| | RRGYAGGKSY | |
| | WAVTYLEAVR GLILRWNMRG RTYGEVNRQD KKQFGTVASA LLHHINQLKE | |
| | DRIKTGADMI IQAARGFVPR KNGAGWVQVH EPCRLILFED LARYRFRTDR | |
| | SRRENSRLMR WSHREIVNEV GMQGELYGLH VDTTEAGFSS RYLASSGAPG | |
| | VRCRHLVEED FHDGLPGMHL VGELDWLLPK DKDRTANEAR RLLGGMVRPG | |
| | MLVPWDGGEL FATLNAASQL HVIHADINAA QNLQRRFWGR CGEAIRIVCN | |
| | QLSVDGSTRY EMAKAPKARL LGALQQLKNG DAPFHLTSIP NSQKPENSYV | |
| | MTPTNAGKKY RAGPGEKSSG EEDELALDIV EQAEELAQGR KTFFRDPSGV | |
| | FFAPDRWLPS EIYWSRIRRR IWQVTLERNS SGRQERAEMD EMPY | |
| Tuberibacillus | MATKSFILKM KTKNNPQLRL SLWKTHELFN FGVAYYMDLL SLFRQKDLYM | (SEQ |
| calidus | HNDEDPDHPV VLKKEEIQER LWMKVRETQQ KNGFHGEVSK DEVLETLRAL | ID NO: |
| WP_027726362.1 | YEELVPSAVG KSGEANQISN KYLYPLTDPA SQSGKGTANS GRKPRWKKLK | 196) |
| | EAGDPSWKDA YEKWEKERQE DPKLKILAAL QSFGLIPLFR PFTENDHKAV | |
| | ISVKWMPKSK NQSVRKFDKD MFNQAIERFL SWESWNEKVA EDYEKTVSIY | |
| | ESLQKELKGI STKAFEIMER VEKAYEAHLR EITFSNSTYR IGNRAIRGWT | |
| | EIVKKWMKLD PSAPQGNYLD VVKDYQRRHP RESGDFKLFE LLSRPENQAA | |
| | WREYPEFLPL YVKYRHAEQR MKTAKKQATF TLCDPIRHPL WVRYEERSGT | |
| | NLNKYRLIMN EKEKVVQFDR LICLNADGHY EEQEDVTVPL APSQQFDDQI | |
| | KFSSEDTGKG KHNFSYYHKG INYELKGTLG GARIQFDREH LLRRQGVKAG | |
| | NVGRIFLNVT LNIEPMQPFS RSGNLQTSVG KALKVYVDGY PKWVNFKPKE | |
| | LTEHIKESEK NTLTLGVESL PTGLRVMSVD LGQRQAAAIS IFEVVSEKPD | |
| | DNKLFYPVKD TDLFAVHRTS FNIKLPGEKR TERRMLEQQK RDQAIRDLSR | |
| | KLKFLKNVLN MQKLEKTDER EKRVNRWIKD REREEENPVY VQEFEMISKV | |
| | LYSPHSVWVD QLKSIHRKLE EQLGKEISKW RQSISQGRQG VYGISLKNIE | |
| | DIEKTRRLLF RWSMRPENPG EVKQLQPGER FAIDQQNHLN HLKDDRIKKL | |
| | ANQIVMTALG YRYDGKRKKW IAKHPACQLV LFEDLSRYAF YDERSRLENR | |
| | NLMRWSRREI PKQVAQIGGL YGLLVGEVGA QYSSRFHAKS GAPGIRCRVV | |
| | KEHELYITEG GQKVRNQKFL DSLVENNIIE PDDARRLEPG DLIRDQGGDK | |
| | FATLDERGEL VITHADINAA QNLQKRFWTR THGLYRIRCE SREIKDAWVL | |
| | VPSDKDQKEK MENLFGIGYL QPFKQENDVY KWVKGEKIKG KKTSSQSDDK | |
| | ELVSEILQEA SVMADELKGN RKTLFRDPSG YVFPKDRWYT GGRYFGTLEH | |
| | LLKRKLAERR LFDGGSSRRG LFNGTDSNTN VE | |
| Bacillus | MATRSFILKI EPNEEVKKGL WKTHEVLNHG IAYYMNILKL IRQEAIYEHH | (SEQ |
| thermoamylovorans | EQDPKNPKKV SKAEIQAELW DFVLKMQKCN SFTHEVDKDV VFNILRELYE | ID NO: |
| WP_041902512.1 | ELVPSSVEKK GEANQLSNKF LYPLVDPNSQ SGKGTASSGR KPRWYNLKIA | 197) |
| | GDPSWEEEKK KWEEDKKKDP LAKILGKLAE YGLIPLFIPF TDSNEPIVKE | |
| | IKWMEKSRNQ SVRRLDKDMF IQALERFLSW ESWNLKVKEE YEKVEKEHKT | |
| | LEERIKEDIQ AFKSLEQYEK ERQEQLLRDT LNTNEYRLSK RGLRGWREII | |
| | QKWLKMDENE PSEKYLEVFK DYQRKHPREA GDYSVYEFLS KKENHFIWRN | |
| | HPEYPYLYAT FCEIDKKKKD AKQQATFTLA DPINHPLWVR FEERSGSNLN | |
| | KYRILTEQLH TEKLKKKLTV QLDRLIYPTE SGGWEEKGKV DIVLLPSRQF | |
| | YNQIFLDIEE KGKHAFTYKD ESIKFPLKGT LGGARVQFDR DHLRRYPHKV | |
| | ESGNVGRIYF NMTVNIEPTE SPVSKSLKIH RDDFPKFVNF KPKELTEWIK | |
| | DSKGKKLKSG IESLEIGLRV MSIDLGQRQA AAASIFEVVD QKPDIEGKLF | |
| | FPIKGTELYA VHRASFNIKL PGETLVKSRE VLRKAREDNL KLMNQKLNFL | |
| | RNVLHFQQFE DITEREKRVT KWISRQENSD VPLVYQDELI QIRELMYKPY | |
| | KDWVAFLKQL HKRLEVEIGK EVKHWRKSLS DGRKGLYGIS LKNIDEIDRT | |
| | RKFLLRWSLR PTEPGEVRRL EPGQRFAIDQ LNHLNALKED RLKKMANTII | |
| | MHALGYCYDV RKKKWQAKNP ACQIILFEDL SNYNPYEERS RFENSKLMKW | |
| | SRREIPRQVA LQGEIYGLQV GEVGAQFSSR FHAKTGSPGI RCSVVTKEKL | |
| | QDNRFFKNLQ REGRLTLDKI AVLKEGDLYP DKGGEKFISL SKDRKLVTTH | |
| | ADINAAQNLQ KRFWTRTHGF YKVYCKAYQV DGQTVYIPES KDQKQKIIEE | |
| | FGEGYFILKD GVYEWGNAGK LKIKKGSSKQ SSSELVDSDI LKDSFDLASE | |
| | LKGEKLMLYR DPSGNVFPSD KWMAAGVFFG KLERILISKL TNQYSISTIE | |
| | DDSSKQSM | |
| Bacillus sp. | MAIRSIKLKL KTHTGPEAQN LRKGIWRTHR LLNEGVAYYM KMLLLFRQES | (SEQ |
| NSP2.1 | TGERPKEELQ EELICHIREQ QQRNQADKNT QALPLDKALE ALRQLYELLV | ID NO: |
| WP_026557978.1 | PSSVGQSGDA QIISRKFLSP LVDPNSEGGK GTSKAGAKPT WQKKKEANDP | 198) |
| | TWEQDYEKWK KRREEDPTAS VITTLEEYGI RPIFPLYTNT VTDIAWLPLQ | |
| | SNQFVRTWDR DMLQQAIERL LSWESWNKRV QEEYAKLKEK MAQLNEQLEG | |
| | GQEWISLLEQ YEENRERELR ENMTAANDKY RITKRQMKGW NELYELWSTF | |
| | PASASHEQYK EALKRVQQRL RGRFGDAHFF QYLMEEKNRL IWKGNPQRIH | |
| | YFVARNELTK RLEEAKQSAT MTLPNARKHP LWVRFDARGG NLQDYYLTAE | |
| | ADKPRSRRFV TFSQLIWPSE SGWMEKKDVE VELALSRQFY QQVKLLKNDK | |
| | GKQKIEFKDK GSGSTFNGHL GGAKLQLERG DLEKEEKNFE DGEIGSVYLN | |
| | VVIDFEPLQE VKNGRVQAPY GQVLQLIRRP NEFPKVTTYK SEQLVEWIKA | |
| | SPQHSAGVES LASGFRVMSI DLGLRAAAAT SIFSVEESSD KNAADFSYWI | |
| | EGTPLVAVHQ RSYMLRLPGE QVEKQVMEKR DERFQLHQRV KFQIRVLAQI | |
| | MRMANKQYGD RWDELDSLKQ AVEQKKSPLD QTDRTFWEGI VCDLTKVLPR | |
| | NEADWEQAVV QIHRKAEEYV GKAVQAWRKR FAADERKGIA GLSMWNIEEL | |
| | EGLRKLLISW SRRTRNPQEV NRFERGHTSH QRLLTHIQNV KEDRLKQLSH | |
| | AIVMTALGYV YDERKQEWCA EYPACQVILF ENLSQYRSNL DRSTKENSTL | |
| | MKWAHRSIPK YVHMQAEPYG IQIGDVRAEY SSRFYAKTGT PGIRCKKVRG | |
| | QDLQGRRFEN LQKRLVNEQF LTEEQVKQLR PGDIVPDDSG ELFMTLTDGS | |
| | GSKEVVFLQA DINAAHNLQK RFWQRYNELF KVSCRVIVRD EEEYLVPKTK | |
| | SVQAKLGKGL FVKKSDTAWK DVYVWDSQAK LKGKTTFTEE SESPEQLEDF | |
| | QEIIEEAEEA KGTYRTLFRD PSGVFFPESV WYPQKDFWGE VKRKLYGKLR | |
| | ERFLTKAR | |
| Alicyclobacillus | MAVKSIKVKL RLDDMPEIRA GLWKLHKEVN AGVRYYTEWL SLLRQENLYR | (SEQ |
| acidoterrestris | RSPNGDGEQE CDKTAEECKA ELLERLRARQ VENGHRGPAG SDDELLQLAR | ID NO: |
| WP_021296342.1 | QLYELLVPQA IGAKGDAQQI ARKFLSPLAD KDAVGGLGIA KAGNKPRWVR | 199) |
| | MREAGEPGWE EEKEKAETRK SADRTADVLR ALADFGLKPL MRVYTDSEMS | |
| | SVEWKPLRKG QAVRTWDRDM FQQAIERMMS WESWNQRVGQ | |
| | EYAKLVEQKN | |
| | RFEQKNFVGQ EHLVHLVNQL QQDMKEASPG LESKEQTAHY VTGRALRGSD | |
| | KVFEKWGKLA PDAPFDLYDA EIKNVQRRNT RRFGSHDLFA KLAEPEYQAL | |
| | WREDASFLTR YAVYNSILRK LNHAKMFATF TLPDATAHPI WTRFDKLGGN | |
| | LHQYTFLFNE FGERRHAIRF HKLLKVENGV AREVDDVTVP ISMSEQLDNL | |
| | LPRDPNEPIA LYFRDYGAEQ HFTGEFGGAK IQCRRDQLAH MHRRRGARDV | |
| | YLNVSVRVQS QSEARGERRP PYAAVFRLVG DNHRAFVHFD KLSDYLAEHP | |
| | DDGKLGSEGL LSGLRVMSVD LGLRTSASIS VFRVARKDEL KPNSKGRVPF | |
| | FFPIKGNDNL VAVHERSQLL KLPGETESKD LRAIREERQR TLRQLRTQLA | |
| | YLRLLVRCGS EDVGRRERSW AKLIEQPVDA ANHMTPDWRE AFENELQKLK | |
| | SLHGICSDKE WMDAVYESVR RVWRHMGKQV RDWRKDVRSG ERPKIRGYAK | |
| | DVVGGNSIEQ IEYLERQYKF LKSWSFFGKV SGQVIRAEKG SRFAITLREH | |
| | IDHAKEDRLK KLADRIIMEA LGYVYALDER GKGKWVAKYP PCQLILLEEL | |
| | SEYQFNNDRP PSENNQLMQW SHRGVFQELI NQAQVHDLLV GTMYAAFSSR | |
| | FDARTGAPGI RCRRVPARCT QEHNPEPFPW WLNKFVVEHT LDACPLRADD | |
| | LIPTGEGEIF VSPFSAEEGD FHQIHADLNA AQNLQQRLWS DFDISQIRLR | |
| | CDWGEVDGEL VLIPRLTGKR TADSYSNKVF YTNTGVTYYE RERGKKRRKV | |
| | FAQEKLSEEE AELLVEADEA REKSVVLMRD PSGIINRGNW TRQKEFWSMV | |
| | NQRIEGYLVK QIRSRVPLQD SACENTGDI | |
| Alicyclobacillus | MTVRSIRVKL AVGSPQYRDV RRGLWKTHEI MNQGVRYYCE WLVLMRQEPI | (SEQ |
| hesperidum | YDEDEHGLTV VQRTREDIQA ELLSRLRTLQ SAHQHSGDMG TDEELLSLMR | ID NO: |
| WP_074693942.1 | QLYEQLVPSS VDKNKSGDAR MIARNFFNPL TNPNSQGGLG ISNAGRKPKW | 200) |
| | LLKKLSGDPT WEEDYKKAME QKQESSVSFL LLELRRFGLH PIFLPYTDTV | |
| | LEVSWAPKKA RQWVRKWDYD LFQQSIERML SWESWTRRVK ERFEKLVESE | |
| | KKFYDENFAT DPEFIKLAET LEGELQASSQ GFVAVDEHAF QIRPRSMRGF | |
| | DRVADEWCKL ADDAPIEEYE AAIKRVQARL GRNFGSYVLF AHLAKPEYWS | |
| | LWRSDPTKIL RFARLRALQR AVARAKRHAR LTLPDAIHHP IWIRYDAKGK | |
| | NIYSYRLLIP EKRSKRYYVE FSSLIMPDGE NRWAEHRNIR VPLAFSRQWE | |
| | RLHFSIMEDG SLCVQYRDPG VDEPLRAELG GAKIQFDRRY LIRRSSTLSA | |
| | GECGPVYLNV SVDVNPAHRP DVQVLQSAKL VSVSRDTNRI YLRPENLSAY | |
| | WKSQGDGTLP LRVMSVDLGV RSSAAVVICR LEHRDSVVSS GRRTATIYRI | |
| | AGTDEFVAVQ ERAFLLRLPG EGKGTNEDAP LRDVYAQLGT IRQGIQILRS | |
| | LLRLCDTKTP DERQEALHGL AQSLEPSGAW KDELHPHLVM LQGVVHDSVD | |
| | NWKQKVISVH RQMERILGHA VREWKVARKN AGKPPIRRGA GGLSLRRIRQ | |
| | LEQERRTLVA WSNHAREPGQ VVRIKRGTQV AQWLVERVNH LKEDRLKKLA | |
| | DLLIMTALGY VYDETKPSGH KWDKRYPPCQ IILMEDLSRY RFQSDRPPSE | |
| | NSQLMAWSHR RLLEILKLQA DLHKLIVGTV FPAFSSRFDA QSGAPGVRCR | |
| | SVKKQDIENA AQGKGWLARE LQRLNWTLEW LQPNDLIPTG DGELFVTPAC | |
| | CDRQKGIKIV HADLNAAQNL QRRFWGGHAE SLCRVTCDVV ERDGRRYAVP | |
| | RISNAFADSF YKVFGQGVFV STDEEDVYRW MVGEKISSRG RSRGRTSDEE | |
| | AEAETWIDEA REQQGKVIAL FRDASGQIHG GDWLVAKVFW GWVERLVTAR | |
| | LLSRMSEREA AAHKE | |
| Alicyclobacillus | MAVKSMKVKL RLDNMPEIRA GLWKLHTEVN AGVRYYTEWL SLLRQENLYR | (SEQ |
| acidiphilus | RSPNGDGEQE CYKTAEECKA ELLERLRARQ VENGHCGPAG SDDELLQLAR | ID NO: |
| WP_067623834.1 | QLYELLVPQA IGAKGDAQQI ARKFLSPLAD KDAVGGLGIA KAGNKPRWVR | 201) |
| | MREAGEPGWE EEKAKAEARK STDRTADVLR ALADFGLKPL MRVYTDSDMS | |
| | SVQWKPLRKG QAVRTWDRDM FQQAIERMMS WESWNQRVGE | |
| | AYAKLVEQKS | |
| | RFEQKNFVGQ EHLVQLVNQL QQDMKEASHG LESKEQTAHY LTGRALRGSD | |
| | KVFEKWEKLD PDAPFDLYDT EIKNVQRRNT RRFGSHDLFA KLAEPKYQAL | |
| | WREDASFLTR YAVYNSIVRK LNHAKMFATF TLPDATAHPI WTRFDKLGGN | |
| | LHQYTFLFNE FGEGRHAIRF QKLLTVEDGV AKEVDDVTVP ISMSAQLDDL | |
| | LPRDPHELVA LYFQDYGAEQ HLAGEFGGAK IQYRRDQLNH LHARRGARDV | |
| | YLNLSVRVQS QSEARGERRP PYAAVFRLVG DNHRAFVHFD KLSDYLAEHP | |
| | DDGKLGSEGL LSGLRVMSVD LGLRTSASIS VFRVARKDEL KPNSEGRVPF | |
| | CFPIEGNENL VAVHERSQLL KLPGETESKD LRAIREERQR TLRQLRTQLA | |
| | YLRLLVRCGS EDVGRRERSW AKLIEQPMDA NQMTPDWREA FEDELQKLKS | |
| | LYGICGDREW TEAVYESVRR VWRHMGKQVR DWRKDVRSGE RPKIRGYQKD | |
| | WVGGNSIEQI EYLERQYKFL KSWSFFGKVS GQVIRAEKGS RFAITLREHI | |
| | DHAKEDRLKK LADRIIMEAL GYVYALDDER GKGKWVAKYP PCQLILLEEL | |
| | SEYQFNNDRP PSENNQLMQW SHRGVFQELL NQAQVHDLLV GTMYAAFSSR | |
| | FDARTGAPGI RCRRVPARCA REQNPEPFPW WLNKFVAEHK LDGCPLRADD | |
| | LIPTGEGEFF VSPFSAEEGD FHQIHADLNA AQNLQRRLWS DFDISQIRLR | |
| | CDWGEVDGEP VLIPRTTGKR TADSYGNKVF YTKTGVTYYE RERGKKRRKV | |
| | FAQEELSEEE AELLVEADEA REKSVVLMRD PSGIINRGDW TRQKEFWSMV | |
| | NQRIEGYLVK QIRSRVRLQE SACENTGDI | |
| Alicyclobacillus | MAVKSIKVKL MLGHLPEIRE GLWHLHEAVN LGVRYYTEWL ALLRQGNLYR | (SEQ |
| macrosporangiidus | RGKDGAQECY MTAEQCRQEL LVRLRDRQKR NGHTGDPGTD EELLGVARRL | ID NO: |
| SFU30094.1 | YELLVPQSVG KKGQAQMLAS GFLSPLADPK SEGGKGTSKS GRKPAWMGMK | 202) |
| | EAGDSRWVEA KARYEANKAK DPTKQVIASL EMYGLRPLFD VFTETYKTIR | |
| | WMPLGKHQGV RAWDRDMFQQ SLERLMSWES WNERVGAEFA | |
| | RLVDRRDRFR | |
| | EKHFTGQEHL VALAQRLEQE MKEASPGFES KSSQAHRITK RALRGADGII | |
| | DDWLKLSEGE PVDRFDEILR KRQAQNPRRF GSHDLFLKLA EPVFQPLWRE | |
| | DPSFLSRWAS YNEVLNKLED AKQFATFTLP SPCSNPVWAR FENAEGTNIF | |
| | KYDFLFDHFG KGRHGVRFQR MIVMRDGVPT EVEGIVVPIA PSRQLDALAP | |
| | NDAASPIDVF VGDPAAPGAF RGQFGGAKIQ YRRSALVRKG RREEKAYLCG | |
| | FRLPSQRRTG TPADDAGEVF LNLSLRVESQ SEQAGRRNPP YAAVFHISDQ | |
| | TRRVIVRYGE IERYLAEHPD TGIPGSRGLT SGLRVMSVDL GLRTSAAISV | |
| | FRVAHRDELT PDAHGRQPFF FPIHGMDHLV ALHERSHLIR LPGETESKKV | |
| | RSIREQRLDR LNRLRSQMAS LRLLVRTGVL DEQKRDRNWE RLQSSMERGG | |
| | ERMPSDWWDL FQAQVRYLAQ HRDASGEAWG RMVQAAVRTL | |
| | WRQLAKQVRD | |
| | WRKEVRRNAD KVKIRGIARD VPGGHSLAQL DYLERQYRFL RSWSAFSVQA | |
| | GQWVRAERDS RFAVALREHI DNGKKDRLKK LADRILMEAL GYVYVTDGRR | |
| | AGQWQAVYPP CQLVLLEELS EYRFSNDRPP SENSQLMVWS HRGVLEELIH | |
| | QAQVHDVLVG TIPAAFSSRF DARTGAPGIR CRRVPSIPLK DAPSIPIWLS | |
| | HYLKQTERDA AALRPGELIP TGDGEFLVTP AGRGASGVRV VHADINAAHN | |
| | LQRRLWENFD LSDIRVRCDR REGKDGTVVL IPRLTNQRVK ERYSGVIFTS | |
| | EDGVSFTVGD AKTRRRSSAS QGEGDDLSDE EQELLAEADD ARERSVVLFR | |
| | DPSGFVNGGR WTAQRAFWGM VHNRIETLLA ERFSVSGAAE KVRG | |
| Sulfobacillus | RQSREDASPQ IIISASDLKA DLLYHARQQQ KEHVPRITGS DAEVLGALRQ | (SEQ |
| thermo- | VYELIVPSSV GKSGDSKTIA RKFLSPLTDP DSAGGRDQSA SGRKPTWTKM | ID NO: |
| sulfidooxidans | KAEGNPLWEE KFRQWKDRKD NDPTPFVLNQ LADYGLLPLI RLFTDVGENI | 203) |
| PSR34340.1 | FDPKKPGQFV RPWDRSMFQQ AIERLMSWES WNQRVRQEWE | |
| | ALTQKHSAFY | |
| | REQFTAEPDA ALYRVAQSLE EEMRKEHQGF ATDAPEAFRI RRVALKGFDR | |
| | LLERWQKTLG KNGQSATLLD DIRRVQSDLG DKFGSAPLYQ KLVDERWQRL | |
| | WTVDPTFLQR YAAFNDLTQR LQRAKRVANL TLPDAVAHPI WSRYEGPNAS | |
| | SGNRYHIHLP TTGQPSSVTF DRILWPDGDG GWYERKRVTV FLRPSHQVDR | |
| | IREAPTDSWV DNFPLVVEDQ SARTILRASW GGAKLEYDRN RLPRQLKKGV | |
| | PDSIYLSLTL NLDTTKPSGL FHMQQNGRVW IRKDVVMQYY NEIPGDNVQF | |
| | KPLYVMSVDL GIRSAAAVSI FSVQLKTGIE EHRLTYPVAD CPGLVAVHER | |
| | SVLLTMPGER REQRDRRYEQ QRQGLRELRT DMRGMNDLLR GAYVDGDRRE | |
| | EFLARLSKLE ETSPELWEPV YRSLNDSKMA PAAEWERLVV YCHRQVEQSL | |
| | SSRIQNLRSG RSAYRMSGGL SLDHVQDLER IRGIIASWTN HPRIPGSVVR | |
| | WQQGRSHTVA LGRHILELKR DRVKKVANYL IMTALGYAYD SKRARGEKWV | |
| | RRYPSCHLMV FEDLTRYRFR TDRPRSENRQ LMRWTHQELI AVTGIQAEPH | |
| | GILVGTMYAG FSSRFDAVTK APGVRGATVR QILRTRGMVR LKEIAADVGV | |
| | DINTLRPHDV LPTGDGEYLL SVVRHRDSYR LKQVHADINA AHNLQRRLWT | |
| | QDEVFRVSCR LALNSERVVA TPPPSYNKRY GKGFFEKGDN GVYIWKTGGK | |
| | IKISDMLEED MDIPEDTAEL LRGNSVTLFR DPSGTIAGGN WLEAKEFWGR | |
| | VNSLVNKGVR DKILGGIPVD NSSAHAE | |
| Spirochaeta sp. | MGLLLPSLSR TVNVTIHLIL HPRKKGSRHR EYAVMLDHAV RKIFLAHNWI | (SEQ |
| LUC14_002_19_ | KRAEAERQKF EADLYKIDRV PQEARDWLDE FCRERTESTG SIDGYHIRRK | ID NO: |
| P3 | AVLGWEALVE AWDQKDCLSV EDRIAAARDL QDNPGMDKFG DIWLYEALAS | 204) |
| OQX29950.1 | APCVWQKDGE PNAQILLDYV DAGEAEYKRS HYKVPAYRHP DPLLHPIFCD | |
| | FGQSRWSISF DIHEFKKNGE KNPVNIHALT MGLVSKKRIV KTELKWSSKR | |
| | LNSNLALSLE SPEDAIEVSR ATRLGRAAVG ASQDRAVNIA GLFESAGWNG | |
| | RLQAPRKQLE ALAKLEEDKS AEALAKALRN RIKWFITFSP KLQPHGPWME | |
| | YAERFSGEAP SRAAVIKGKY TVIHQDKTRR RPLAKLHLCR MPGLRVLSVD | |
| | LGHRHAAACA VWETLSSESM EKKCREAGCL PPAPEDLYLH LKKKNKTAVY | |
| | RRIGGNFLPD GNEHPAPWAK LDRQFIIDLQ GEEGCTRMAL AGEIWQVHCM | |
| | EKVFGRSIPL VDRLVRAGWG EKNKQPEILQ ELKQKGWVPL EVSKTNTGYH | |
| | YSLCVDSLMT LAVNTVRFAL RRHACRARIA YYMEGGAIPE GGLPENSGNK | |
| | DFIVEALMLW YELATDSRWN GSWEANFWDE NFDKKLAEIQ DAVNEREGDK | |
| | AKIIKQKERK ELLKKEFIPL AEGLLENSRR ISIASQWRMV WNEEDAIWQS | |
| | ELRSLRDWIL PKGTRGKKRT IRHVGGLSLS RLAVIKSLYR VQKSFYTRMK | |
| | PEGEPMDGTM AVGEGFGQKI LDDLETMKEQ RVKQLASRVV EAALGTGRIK | |
| | KPENNKTPKR PFTAVDEPCH AVVIENLTHY RPENKRTRRE NRQLMTWSSS | |
| | KVKKYLFESC QLHGLYLFEV QASYTSRQDS RTGAPGVRCS ELSVKKFLES | |
| | PFRQREIAHA EENMAQENPC NRYLIALHNK WKNREYDKTA PPLRIPHWGG | |
| | EIFVSALTGN TLQADLNAAA NIGLQALLDP DWPGRWWYVP AVKGCDGRRI | |
| | PHSKCSGAAC LDNWRVGLKN NLYTGVRTPL PGKNKGSTSG EDVHKSNAVE | |
| | KSTINLWRDI SVLPLTEGQW | |
| Bacillus hisashii | MATRSFILKI EPNEEVKKGL WKTHEVLNHG IAYYMNILKL IRQEAIYEHH | (SEQ |
| strain C4 v4 | EQDPKNPKKV SKAEIQAELW DFVLKMQKCN SFTHEVDKDE VFNILRELYE | ID NO: |
| mutant of | ELVPSSVEKK GEANQLSNKF LYPLVDPNSQ SGKGTASSGR KPRWYNLKIA | 205) |
| WP_095142515.1 | GDPSWEEEKK KWEEDKKKDP LAKILGKLAE YGLIPLFIPY TDSNEPIVKE | |
| K846R | IKWMEKSRNQ SVRRLDKDMF IQALERFLSW ESWNLKVKEE YEKVEKEYKT | |
| S893R | LEERIKEDIQ ALKALEQYEK ERQEQLLRDT LNTNEYRLSK RGLRGWREII | |
| E837G | QKWLKMDENE PSEKYLEVFK DYQRKHPREA GDYSVYEFLS KKENHFIWRN | |
| | HPEYPYLYAT FCEIDKKKKD AKQQATFTLA DPINHPLWVR FEERSGSNLN | |
| | KYRILTEQLH TEKLKKKLTV QLDRLIYPTE SGGWEEKGKV DIVLLPSRQF | |
| | YNQIFLDIEE KGKHAFTYKD ESIKFPLKGT LGGARVQFDR DHLRRYPHKV | |
| | ESGNVGRIYF NMTVNIEPTE SPVSKSLKIH RDDFPKVVNF KPKELTEWIK | |
| | DSKGKKLKSG IESLEIGLRV MSIDLGQRQA AAASIFEVVD QKPDIEGKLF | |
| | FPIKGTELYA VHRASFNIKL PGETLVKSRE VLRKAREDNL KLMNQKLNFL | |
| | RNVLHFQQFE DITEREKRVT KWISRQENSD VPLVYQDELI QIRELMYKPY | |
| | KDWVAFLKQL HKRLEVEIGK EVKHWRKSLS DGRKGLYGIS LKNIDEIDRT | |
| | RKFLLRWSLR PTEPGEVRRL EPGQRFAIDQ LNHLNALKED RLKKMANTII | |
| | MHALGYCYDV RKKKWQAKNP ACQIILFEDL SNYNPYGERS RFENSRLMKW | |
| | SRREIPRQVA LQGEIYGLQV GEVGAQFSSR FHAKTGSPGI RCRVVTKEKL | |
| | QDNRFFKNLQ REGRLTLDKI AVLKEGDLYP DKGGEKFISL SKDRKCVTTH | |
| | ADINAAQNLQ KRFWTRTHGF YKVYCKAYQV DGQTVYIPES KDQKQKIIEE | |
| | FGEGYFILKD GVYEWVNAGK LKIKKGSSKQ SSSELVDSDI LKDSFDLASE | |
| | LKGEKLMLYR DPSGNVFPSD KWMAAGVFFG KLERILISKL TNQYSISTIE | |
| | DDSSKQSM | |

TABLE 7
Cas12c (C2c3) orthologs

| | | |
|---|---|---|
| OspCas12c | MTKLRHRQKK LTHDWAGSKK REVLGSNGKL QNPLLMPVKK GQVTEFRKAF | (SEQ ID |
| AWU30132.1 | SAYARATKGE MTDGRKNMFT HSFEPFKTKP SLHQCELADK AYQSLHSYLP | NO: 206) |
| KZX85786.1 | GSLAHFLLSA HALGFRIFSK SGEATAFQAS SKIEAYESKL ASELACVDLS | |
| | IQNLTISTLF NALTTSVRGK GEETSADPLI ARFYTLLTGK PLSRDTQGPE | |
| | RDLAEVISRK IASSFGTWKE MTANPLQSLQ FFEEELHALD ANVSLSPAFD | |
| | VLIKMNDLQG DLKNRTIVFD PDAPVFEYNA EDPADIIIKL TARYAKEAVI | |
| | KNQNVGNYVK NAITTTNANG LGWLLNKGLS LLPVSTDDEL LEFIGVERSH | |
| | PSCHALIELI AQLEAPELFE KNVFSDTRSE VQGMIDSAVS NHIARLSSSR | |
| | NSLSMDSEEL ERLIKSFQIH TPHCSLFIGA QSLSQQLESL PEALQSGVNS | |
| | ADILLGSTQY MLTNSLVEES IATYQRTLNR INYLSGVAGQ INGAIKRKAI | |
| | DGEKIHLPAA WSELISLPFI GQPVIDVESD LAHLKNQYQT LSNEFDTLIS | |
| | ALQKNFDLNF NKALLNRTQH FEAMCRSTKK NALSKPEIVS YRDLLARLTS | |
| | CLYRGSLVLR RAGIEVLKKH KIFESNSELR EHVHERKHFV FVSPLDRKAK | |
| | KLLRLTDSRP DLLHVIDEIL QHDNLENKDR ESLWLVRSGY LLAGLPDQLS | |
| | SSFINLPIIT QKGDRRLIDL IQYDQINRDA FVMLVTSAFK SNLSGLQYRA | |
| | NKQSFVVTRT LSPYLGSKLV YVPKDKDWLV PSQMFEGRFA DILQSDYMVW | |
| | KDAGRLCVID TAKHLSNIKK SVFSSEEVLA FLRELPHRTF IQTEVRGLGV | |
| | NVDGIAFNNG DIPSLKTFSN CVQVKVSRTN TSLVQTLNRW FEGGKVSPPS | |
| | IQFERAYYKK DDQIHEDAAK RKIRFQMPAT ELVHASDDAG WTPSYLLGID | |
| | PGEYGMGLSL VSINNGEVLD SGFIHINSLI NFASKKSNHQ TKVVPRQQYK | |
| | SPYANYLEQS KDSAAGDIAH ILDRLIYKLN ALPVFEALSG NSQSAADQVW | |
| | TKVLSFYTWG DNDAQNSIRK QHWFGASHWD IKGMLRQPPT EKKPKPYIAF | |
| | PGSQVSSYGN SQRCSCCGRN PIEQLREMAK DTSIKELKIR NSEIQLFDGT | |
| | IKLFNPDPST VIERRRHNLG PSRIPVADRT FKNISPSSLE FKELITIVSR | |
| | SIRHSPEFIA KKRGIGSEYF CAYSDCNSSL NSEANAAANV AQKFQKQLFF | |
| | EL | |
| QFN42172.1 | MRSNYHGGRN ARQWRKQISG LARRTKETVF TYKFPLETDA AEIDFDKAVQ | (SEQ ID |
| | TYGIAEGVGH GSLIGLVCAF HLSGFRLFSK AGEAMAFRNR SRYPTDAFAE | NO: 207) |
| | KLSAIMGIQL PTLSPEGLDL IFQSPPRSRD GIAPVWSENE VRNRLYTNWT | |
| | GRGPANKPDE HLLEIAGEIA KQVFPKFGGW DDLASDPDKA LAAADKYFQS | |
| | QGDFPSIASL PAAIMLSPAN STVDFEGDYI AIDPAAETLL HQAVSRCAAR | |
| | LGRERPDLDQ NKGPFVSSLQ DALVSSQNNG LSWLFGVGFQ HWKEKSPKEL | |
| | IDEYKVPADQ HGAVTQVKSF VDAIPLNPLF DTTHYGEFRA SVAGKVRSWV | |
| | ANYWKRLLDL KSLLATTEFT LPESISDPKA VSLFSGLLVD PQGLKKVADS | |
| | LPARLVSAEE AIDRLMGVGI PTAADIAQVE RVADEIGAFI GQVQQFNNQV | |
| | KQKLENLQDA DDEEFLKGLK IELPSGDKEP PAINRISGGA PDAAAEISEL | |
| | EEKLQRLLDA RSEHFQTISE WAEENAVTLD PIAAMVELER LRLAERGATG | |
| | DPEEYALRLL LQRIGRLANR VSPVSAGSIR ELLKPVFMEE REFNLFFHNR | |
| | LGSLYRSPYS TSRHQPFSID VGKAKAIDWI AGLDQISSDI EKALSGAGEA | |
| | LGDQLRDWIN LAGFAISQRL RGLPDTVPNA LAQVRCPDDV RIPPLLAMLL | |
| | EEDDIARDVC LKAFNLYVSA INGCLFGALR EGFIVRTRFQ RIGTDQIHYV | |
| | PKDKAWEYPD RLNTAKGPIN AAVSSDWIEK DGAVIKPVET VRNLSSTGFA | |
| | GAGVSEYLVQ APHDWYTPLD LRDVAHLVTG LPVEKNITKL KRLTNRTAFR | |
| | MVGASSFKTH LDSVLLSDKI KLGDFTIIID QHYRQSVTYG GKVKISYEPE | |
| | RLQVEAAVPV VDTRDRTVPE PDTLFDHIVA IDLGERSVGF AVFDIKSCLR | |
| | TGEVKPIHDN NGNPVVGTVA VPSIRRLMKA VRSHRRRRQP NQKVNQTYST | |
| | ALQNYRENVI GDVCNRIDTL MERYNAFPVL EFQIKNFQAG AKQLEIVYGS | |
| QFN42158.1 | MKKFELKQNF RNNYSGKTLR NFRQTLAQIA NKKSSDSILT IKFKLDCSKT | (SEQ ID |
| | GKLPKYENLI SLYDTIEDIK KGTLSYYLFT LIVSGFKFFG SASQAKAFST | NO: 208) |
| | KDIFKDNDFY NQFKIQSHLD LPDFVPSKIY QRLKKNVRST NGKDNAFKAS | |
| | VIVAEYRKEI GKLKNKDESS EHQCEELFKK IGTALETRFS SWQDLINNCS | |
| | TGCEIIDEIL NDSFGTLPSI KKMVLASTTQ SSDGEQDGIA IAYDPDSTFI | |
| | KSDELLNPYF AVATILKSMP PEIQQDKKSA YVKANLTTPT HNALSWIFGK | |
| | GLTLFQTEST EKLCAMFNVS DKRVIEQVQD AAKAVKLPAE LDLNHCTLKF | |
| | QDFRSSLGGH LDSWTTNYLK RLDELNDLLL NLPKNLSLPD IFMIDGKDFI | |
| | EYSGCNRDEI QQMIDFVVNE QNRIKLQESL NALLGKGNNQ ICSDDISTVK | |
| | DFSEIVNSLH SFVQQIDNSL EQSSNEANSI FSELKKKIEK NEKWDIWKNN | |
| | LKKIPKLNKL SGGVPDAWKE IREIEQKFHE ISENQKKHFT EVMEWIDAGN | |
| | GTIDIFESRF KYDELLKKSK KNNLQSADEL AFRSVLNKLG RFARQGNDLV | |
| | CEKIKNWFKE QNIFDSSKDF NRYFINQKGF IFKHPSSKKD NSPYNLSANL | |
| | LEKRYEVTNT VGALLEQCES DPAIVNDPFS MRSLVEFRAL WFSINISGIS | |
| | KEQHIPTKIA QPKLDDSTYQ ESVSPTLKYR LEKEQITSSE LNSIFTVYKS | |
| | LLSGLSIRLS RNSFYLRTKF SWIGNNSLIY CPKETTWKIP AAYFKSDLWN | |
| | EYKDKQILIV NEEYDVDVVK TFESVYKIVK SKDNNEKNRI LPLLKQLPHD | |
| | WMFKLPFGAS NAEKCKVLKL EKNNKKFKPL SVSKDSLARL SGPSTYFNQI | |
| | DEIMMNDESE LSEMTLLADE PVRQQMSNGK IEIIPDDYVM SLAIPITRSL | |
| | KKGNTESFPF KNIVSIDQGE AGFAYAVFKL SDCGNERAEP IATGLIPIPS | |
| | IRRLIHSVKK YRGKKQRIQN FNQKFDSTMF TLRENVTGDI CGLIVALMKK | |
| | YNAFPILEKQ VGNLESGSKQ LMLVYKAVNS KFLAAKVDMQ NDQRRSWWYQ | |
| | GNSWNTPILR ISNPNQSNNK NIVKNINGKK YEELKIYPGY SVSAYMTSCI | |
| | CHVCGRNALE LLKNDDSTGK VKKYQINQDG EVTIGGEVIK LYRKPDRLTP | |
| | VKNLAKKGNR ERTYASINER APMSKDTTQS RYFCVFKNCP CHNKEQHADV | |
| | NAAINIGRRF LKDCILDDNK EKD | |
| QFN42173.1 | MNARDWRKHV GVLAQQHKET TRTYTFPLDT TGSAIDFDAA LQAYNAVEGV | (SEQ ID |
| | GYGSLLGLAC AVHLSGFRLF STGKEAATFR NRARYPNAAF QAALRKELGT | NO: 209) |
| | TITTLTPETL DRLFSSRPKR RNGVPLPWNQ DSIRDRLYTN WVKPRPGDTP | |
| | DAVLFQIATG IAQEITEDVS SWTDLAKNSD RGLKAAHRYF ARVGGFPAFD | |
| | NLTPPATVQP TDTTIDYDPN APFHLVSHAD QTLIHQSISL CAHRIRQEDP | |
| | ALDPNKSGFI KQLQNNFLSQ TFYGLSWLFG AGYVHFRECT ANDLAIQYGI | |
| | PNNCRDGIHQ IKSFADAILP NTFFEKKHYR KDSRSVGKKA KSWISNYWQR | |
| | LLQLQTWVDD HTWVTLPQEL TEAQFKPLFR GLLVDAVELM AIAERLPQRL | |
| | ADCRDSLDCL MGKGPQAATK NDVEIVEKVR EEIESFVGQI EQLGNQLRHQ | |
| | LENENNDQVH RDNLHQLKNR LPLDLRRPQA LNKISGGVPD VAKSIRGLET | |
| | QLDQVLKERR SHFGRLTKWA KECGITLDPL QPLIESEKQR VAERGSAHDA | |
| | KELAIRLLLQ RIGRLGHRLS PTNATAIQEL LRPVFAVKRE FNLFFHNHMG | |
| | ALYRSPYSTS RHQPFQINVD VAHGTDWIGT IETLIQNLFT QIQDDALLRD | |
| | LVQLEGFVFS HKLRALPGVI PSELARPNNL QQMGLPALLL VLLQADQVHR | |
| | ETVLRVFNLY GSAINGYLFQ ALRPGFIVRA GFQRLETKKL RYVPKAQSWQ | |
| | YPDRLHHAKS AIKNSLSAGW IKKNHQGAIL PQKTLTALVK QKSLKDTGVP | |
| | EYLVQAPHDW YVPIDLRGPA IPIEGLTVGT EGPELTQLGP MKDDCAFRAI | |
| | GPSSFKSKID AGLLPQDVKY GDMTLIFDQH YQQSISFANG TFSIQYQPTS | |
| | LQVKAAIPWV DKRPRDTRNN SHLYDRIVAI DLGERKIGYA IFDLKQVLKS | |
| | EQLEPMREDG KPLIGSISIR SIRGLMKAVQ THRNRRQPNY RIDQTYSKAL | |
| | MHYRESVIGD VCNAIDTLCA RYGGFPVLES SVRNFEVGSA QLKTVYGSVS | |
| | RRYTWSAVDA HKNQRQQYWL GGTKDKIPIW THPYLMTREW DEKNSKWSNR | |
| | SKPLKMHPGV EVHPAGTSQI CHQCKRNPIG ALWNVADTVV LDDQGQLDLD | |
| | DGTIRLNSGY IDTTEIKRAR RKKIRLPENK PLTGSHKTSH VRAVARRNLR | |
| | QPPKSTRAKD TTQSRYTCLY VDCGHECHAD ENAAINIGRK YLQERIHIEA | |
| | SRQALSTR | |
| QFN42174.1 | MVAGLKKIKR DGVTMKSNYH GGVKARAWRK RIGGLARRQK ETVFTYKFPL | (SEQ ID |
| | ETEEAGIDFD KAVQTYGIAE GISQGSLIGL VCAFHLSGFR LFSKADETKA | NO: 210) |
| | FCNQGRYPNQ AFAEKLRNEL SVTLPKLSPQ SLDVLFQSSP KSKNGVAPEW | |
| | SKNAIRNRLY TNWTGKGAGT NPDEHLLEIA EDIAAEIDSD LDGWKDLEEH | |
| | PEKGLSAADR YFQAQGDFPS LTGLPPSVPL TPQNSTVAFE GDPVCLNPSD | |
| | NTLLHQAVAR CAGRILQEQP NLSPDKNRFI NQLQDELVSS QNNGLSWLFG | |
| | VGFKYWKEMS VDQLADDYKV KSTDLDALKQ VKSFIDAIPL NPLFDTPHYG | |
| | EFRASVAGKM RSWVKNYWKR LLDLKSQLGT ANINLPEGLD EQRAENLFSG | |
| | LLIDSKGLRQ VTDKLPSRLK KAEDTIDRLM GDGNPTSDDI EQVETVAAEI | |
| | SAFIGQVEQF NNQLEQRLEN PLEGDDETFL KQLKIDLPAE FKKPPAINRI | |
| | SGGSPDPTAE IAELEEKLDR LMSARKEHYE TIAEWASANK VTLDPMEAMT | |
| | TLEAQRLTER GAEGDQEEFA LRLLLQRIGR LANRLSPQGA TAIRDLLRPV | |
| | FTEKREFNLF FHNRMGSLYR SPYSTSRHQP FTIDVAVAKN TDWMDALDGI | |
| | AETIMKGLSQ AGDELSLRQL EEDEVSREVC LKAFNLYVSA INGCLFRALR | |
| | EGFIVRTKFQ RLERDVLSYV PKTKLWNYPQ RLDTARGPIH SALAAAWINK | |
| | EGSVIDPVET VTALSDTGFS DDGIPEYLVQ APHDWYLRDW INISGFSLSQ | |
| | RLRGLPDTVP GELALVRSAD DVRIPPMLAL TPIDLRDISK PVSGLPVKKN | |
| | ITGLKRQKKQ TAFRMVGPSS FKSHLDSTLL SEEVKLGDFT LIFDQYYKQR | |
| | VSYNGRVKIT FEPDRLHVEA AVPVIDKRVR PSTEEDALFD HLLAIDLGEK | |
| | RVGYAVYDIK ACLRTGDIKP LEDGDGKPIV GSVAVPSIRR LMKAVRSHRQ | |
| | QRQPNQKVNQ TYSTALMNYR ENVIGDVCNR IDTLMEKYNA FPVLESSVMN | |
| | FEAGSRQLEM VYGSVLHRYT YSKIDAHTAK RKEYWYTGEY WDHPYLMAHK | |
| | WNERTRSYSG SLSALTLYPG VMVHPAGTSQ RCHQCKRNPM VEIKQLTGQV | |
| | EINADGSLEL DDGTICLYEG YDYSPEEYKK AKREKRRLDP NVPLSGRHQA | |
| | KHVSAVAKRN LRRPTVSMMS GDTTQARYVC LYTDCDFTGH ADENAAINIG | |
| | WKYLTERIAL SESKDKAGV | |

TABLE 8
Cas12e (CasY) orthologs

| | | |
|---|---|---|
| APG80656.1 | MSKRHPRISG VKGYRLHAQR LEYTGKSGAM | (SEQ ID |
| GI: | RTIKYPLYSS PSGGRTVPRE IVSAINDDYV | NO: 211) |
| 1110962136 | GLYGLSNFDD LYNAEKRNEE KVYSVLDFWY | |
| QFN42175.1 | DCVQYGAVFS YTAPGLLKNV AEVRGGSYEL | |
| | TKTLKGSHLY DELQIDKVIK FLNKKEISRA | |
| | NGSLDKLKKD IIDCFKAEYR ERHKDQCNKL | |
| | ADDIKNAKKD AGASLGERQK KLFRDFFGIS | |
| | EQSENDKPSF TNPLNLTCCL LPFDTVNNNR | |
| | NRGEVLENKL KEYAQKLDKN EGSLEMWEYI | |
| | GIGNSGTAFS NFLGEGFLGR LRENKITELK | |
| | KAMMDITDAW RGQEQEEELE KRLRILAALT | |
| | IKLREPKFDN HWGGYRSDIN GKLSSWLQNY | |
| | INQTVKIKED LKGHKKDLKK AKEMINRFGE | |
| | SDTKEEAVVS SLLESIEKIV PDDSADDEKP | |
| | DIPAIAIYRR FLSDGRLTLN RFVQREDVQE | |
| | ALIKERLEAE KKKKPKKRKK KSDAEDEKET | |
| | IDFKELFPHL AKPLKLVPNF YGDSKRELYK | |
| | KYKNAAIYTD ALWKAVEKIY KSAFSSSLKN | |
| | SFFDTDFDKD FFIKRLQKIF SVYRRFNTDK | |
| | WKPIVKNSFA PYCDIVSLAE NEVLYKPKQS | |
| | RSRKSAAIDK NRVRLPSTEN IAKAGIALAR | |
| | ELSVAGFDWK DLLKKEEHEE YIDLIELHKT | |
| | ALALLLAVTE TQLDISALDF VENGTVKDFM | |
| | KTRDGNLVLE GRFLEMFSQS IVFSELRGLA | |
| | GLMSRKEFIT RSAIQTMNGK QAELLYIPHE | |
| | FQSAKITTPK EMSRAFLDLA PAEFATSLEP | |
| | ESLSEKSLLK LKQMRYYPHY FGYELTRTGQ | |
| | GIDGGVAENA LRLEKSPVKK REIKCKQYKT | |
| | LGRGQNKIVL YVRSSYYQTQ FLEWFLHRPK | |
| | NVQTDVAVSG SFLIDEKKVK TRWNYDALTV | |
| | ALEPVSGSER VFVSQPFTIF PEKSAEEEGQ | |
| | RYLGIDIGEY GIAYTALEIT GDSAKILDQN | |
| | FISDPQLKTL REEVKGLKLD QRRGTFAMPS | |
| | TKIARIRESL VHSLRNRIHH LALKHKAKIV | |
| | YELEVSRFEE GKQKIKKVYA TLKKADVYSE | |
| | IDADKNLQTT VWGKLAVASE ISASYTSQFC | |
| | GACKKLWRAE MQVDETITTQ ELIGTVRVIK | |
| | GGTLIDAIKD FMRPPIFDEN DTPFPKYRDF | |
| | CDKHHISKKM RGNSCLFICP FCRANADADI | |
| | QASQTIALLR YVKEEKKVED YFERFRKLKN | |
| | IKVLGQMKKI | |

### 6.4. Protospacer Adjacent Motif

[0233] As used herein, the term “protospacer adjacent sequence” or “protospacer adjacent motif” or “PAM” refers to an approximately 2-6 base pair DNA sequence (or a 2-, 3—, 4-, 5-, 6-, 7-, 8-, 9-, 10-, 11-, 12-long nucleotide sequence) that is an important targeting component of a Cas9 nuclease. Typically, the PAM sequence is on either strand, and is downstream in the 5′ to 3′ direction of Cas9 cut site. The canonical PAM sequence (i.e., the PAM sequence that is associated with the Cas9 nuclease of Streptococcus pyogenes or SpCas9) is 5′-NGG-3′ wherein “N” is any nucleobase followed by two guanine (“G”) nucleobases. Different PAM sequences can be associated with different Cas9 nucleases or equivalent proteins from different organisms. In addition, any given Cas9 nuclease may be modified to alter the PAM specificity of the nuclease such that the nuclease recognizes alternative PAM sequence.

[0234] For example, with reference to the canonical SpCas9 amino acid sequence, the PAM specificity can be modified by introducing one or more mutations, including (a) D1135V, R1335Q, and T1337R “the VQR variant”, which alters the PAM specificity to NGAN or NGNG, (b) D1135E, R1335Q, and T1337R “the EQR variant”, which alters the PAM specificity to NGAG, and (c) D1135V, G1218R, R1335E, and T1337R “the VRER variant”, which alters the PAM specificity to NGCG. In addition, the D1135E variant of canonical SpCas9 still recognizes NGG, but it is more selective compared to the wild type SpCas9 protein.

[0235] It will also be appreciated that Cas9 enzymes from different bacterial species (i.e., Cas9 orthologs) can have varying PAM specificities and some embodiments are therefore chosen based on the desired PAM recognition. For example, Cas9 from Staphylococcus aureus (SaCas9) recognizes NGRRT or NGRRN. In addition, Cas9 from Neisseria meningitis (NmCas) recognizes NNNNGATT. In another example, Cas9 from Streptococcus thermophilis (StCas9) recognizes NNAGAAW. In still another example, Cas9 from Treponema denticola (TdCas) recognizes NAAAAC. These examples are not meant to be limiting. It will be further appreciated that non-SpCas9s bind a variety of PAM sequences, which makes them useful to expand the range of sequences that can be targeted according to the invention. Furthermore, non-SpCas9s may have other characteristics that make them more useful than SpCas9. For example, Cas9 from Staphylococcus aureus (SaCas9) is about 1 kilobase smaller than SpCas9, so it can be packaged into adeno-associated virus (AAV). Further reference may be made to Shah et al., “Protospacer recognition motifs: mixed identities and functional diversity,” RNA Biology, 10(5): 891-899 (which is incorporated herein by reference). Gasiunas used cell-free biochemical screens to identify protospacer adjacent motif (PAM) and guide RNA requirements of 79 Cas9 proteins. (Gasiunas et al., A catalogue of biochemically diverse CRISPR-Cas9 orthologs, Nature Communications 11:5512 doi.org/10.1038/s41467-020-19344-1) The authors described 7 classes of gRNA and 50 different PAM requirement.

[0236] Oh, Y. et al. describe linking reverse transcriptase to a Francisella novicida Cas9 [FnCas9(H969A)] nickase module. (Oh, Y. et al., Expansion of the prime editing modality with Cas9 from Francisella novicida, bioRxiv 2021.05.25.445577; doi.org/10.1101/2021.05.25.445577). By increasing the distance to the PAM, the FnCas9(H969A) nickase module expands the region of a reverse transcription template (RTT) following the primer binding site.

### 6.5. Prime Editors

[0237] “Prime editor fusion protein” describes a protein that is used in prime editing. Prime editing uses CRISPR enzyme that nicks or cuts only single strand of double stranded DNA, i.e., a nickase; and a nickase can occur either naturally or by mutation or modification of a nuclease that makes double stranded cuts. Such an enzyme can be a catalytically-impaired Cas9 endonuclease (a nickase). Such an enzyme can be a Cas12a/b, MAD7, or variant thereof. The nickase is fused to an engineered reverse transcriptase (RT). The nickase is programmed (directed) with a prime-editing guide RNA (pegRNA). The skilled person in the art would appreciate that the pegRNA both specifies the target site and encodes the desired edit. Advantageously the nickase is a catalytically-impaired Cas9 endonuclease, a Cas9 nickase, that is fused to the reverse transcriptase. During genetic editing, the Cas9 nickase part of the protein is guided to the DNA target site by the pegRNA, whereby a nick or single stranded cut occurs. The reverse transcriptase domain then uses the pegRNA to template reverse transcription of the desired edit, directly polymerizing DNA onto the nicked target DNA strand. The edited DNA strand replaces the original DNA strand, creating a heteroduplex containing one edited strand and one unedited strand. Afterward, optionally, the prime editor (PE) guides resolution of the heteroduplex to favor copying the edit onto the unedited strand, completing the process (typically achieved with a nickase gRNA).

[0238] As used herein, “PE1” refers to a PE complex comprising a fusion protein comprising Cas9(H840A) and a wild type MMLV RT having the following N-terminus to C-terminus structure: [NLS]-[Cas9(H840A)]-[linker]-[MMLV_RT(wt)]+a desired atgRNA (or PEgRNA). In various embodiments, the prime editors disclosed herein is comprised of PE1.

[0239] As used herein, “PE2” refers to a PE complex comprising a fusion protein comprising Cas9(H840A) and a variant MMLV RT having the following N-terminus to C-terminus structure:

[0240] [NLS]-[Cas9(H840A)]-[linker]-[MMLV_RT(D200N)(T330P)(L603W)(T306K)(W313F)]+a desired atgRNA (or PEgRNA). In various embodiments, the prime editors disclosed herein are comprised of PE2. In various embodiments, the prime editors disclosed herein is comprised of PE2 and co-expression of MMR protein MLH1dn, that is PE4.

[0241] As used herein, “PE3” refers to PE2 plus a second-strand nicking guide RNA that complexes with the PE2 and introduces a nick in the non-edited DNA strand. The induction of the second nick increases the chances of the unedited strand, rather than the edited strand, to be repaired. In various embodiments, the prime editors disclosed herein are comprised of PE3. In various embodiments, the prime editors disclosed herein are comprised of PE3 and co-expression of MMR protein MLH1dn, that is PE5.

[0242] As used herein, “PE3b” refers to PE3 but wherein the second-strand nicking guide RNA is designed for temporal control such that the second strand nick is not introduced until after the installation of the desired edit. This is achieved by designing a gRNA with a spacer sequence with mismatches to the unedited original allele that matches only the edited strand. Using this strategy, mismatches between the protospacer and the unedited allele should disfavor nicking by the sgRNA until after the editing event on the PAM strand takes place.

### 6.6. Guides for Prime Editing

[0243] Anzalone et al., 2019 (Nature 576:149) describes prime editing and a prime editing complex using a type II CRISPR and can be used herein. A prime editing complex consists of a type II CRISPR PE protein containing an RNA-guided DNA-nicking domain fused to a reverse transcriptase (RT) domain and complexed with a pegRNA. The pegRNA comprises (5′ to 3′) a spacer that is complementary to the target sequence of a genomic DNA, a nickase (e.g. Cas9) binding site, a reverse transcriptase template including editing positions, and primer binding site (PBS). The PE-pegRNA complex binds the target DNA and the CRISPR protein nicks the PAM-containing strand. The resulting 3′ end of the nicked target hybridizes to the primer-binding site (PBS) of the pegRNA, then primes reverse transcription of new DNA containing the desired edit using the RT template of the pegRNA. The overall structure of the pegRNA is like that of a typical type II sgRNA with a reverse transcriptase template/primer binding site appended to the 3′ end. The structure leaves the PBS at the 3′ end of the pegRNA free to bind to the nicked strand complementary to the target which forms the primer for reverse transcription.

[0244] Guide RNAs of CRISPRs differ in overall structure. For example, while the spacer of a type II gRNA is located at the 5′ end, the spacer of a type V gRNA is located towards the 3′ end, with the CRISPR protein (e.g. Cas12a) binding region located toward the 5′ end. Accordingly, the regions of a type V pegRNA are rearranged compared to a type II pegRNA. The overall structure of the pegRNA is like that of a typical type II sgRNA with a reverse transcriptase template/primer binding site appended to the 3′ end. The pegRNA comprises (5′ to 3′) a CRISPR protein-binding region, a spacer which is complementary to the target sequence of a genomic DNA, a reverse transcriptase template including editing positions, and primer binding site (PBS).

[0245] In typical embodiments, an atgRNA comprises a reverse transcriptase template that encodes, partially or in its entirety, an integration recognition site (also referred to as an integration target recognition site) or a recombinase recognition site (also referred to as a recombinase target recognition site). The integration target recognition site, which is to be placed at a desired location in the genome or intracellular nucleic acid, is referred to as a “beacon” site or an “attachment site” or a “landing pad” or “landing site.” An integration target recognition site or recombinase target recognition site incorporated into the pegRNA is referred to as an attachment site containing guide RNA (atgRNA).

### 6.7. Attachment Site-Containing Guide RNA (atgRNA)

[0246] As used herein, the term “attachment site-containing guide RNA” (atgRNA) and the like refer to an extended single guide RNA (sgRNA) comprising a primer binding site (PBS), a reverse transcriptase (RT) template sequence, and wherein the RT template encodes for an integration recognition site or a recombinase recognition site that can be recognized by a recombinase, integrase, or transposase. In some embodiments, the RT template comprises a clamp sequence and an integration recognition site. As referred to herein an atgRNA may be referred to as a guide RNA. An integration recognition site or recombinase target recognition site incorporated into the pegRNA is referred to as an attachment site containing guide RNA (atgRNA).

[0247] As used herein, the term “cognate integration recognition site” or “integration cognate” or “cognate pair” refers to a first integration recognition site (e.g., any of the integration recognition sites described herein) and a second integration recognition site (e.g., any of the integration recognition sites described herein) that can be recombined. Recombination between a first integration recognition site (e.g., any of the integration recognition sites described herein) and a second recognition site (e.g., any of the integration recognition sites described herein) is mediated by functional symmetry between the two integration recognition sites and the central dinucleotide of each of the two integration recognition sites. In some cases, a first integration recognition site (e.g., any of the integration recognition sites described herein) that can be recombined with a second integration recognition site (e.g., any of the integration recognition sites described herein) are referred to as a “cognate pair.” A non-limiting example of a cognate pair include an attB site and an attP site, whereby a serine integrase mediates recombination between the attB site and the attP site.

[0248] In typical embodiments, an atgRNA comprises a reverse transcriptase template that encodes, partially or in its entirety, an integration recognition site (also referred to as an integration target recognition site) or a recombinase recognition site (also referred to as a recombinase target recognition site). The integration target recognition site, which is to be placed at a desired location in the genome or intracellular nucleic acid, is referred to as a “beacon,” a “beacon” site or an “attachment site” or a “landing pad” or “landing site.” An integration target recognition site or recombinase target recognition site incorporated into the pegRNA is referred to as an attachment site containing guide RNA (atgRNA).

[0249] During genome editing, the primer binding site allows the 3′ end of the nicked DNA strand to hybridize to the atgRNA, while the RT template serves as a template for the synthesis of edited genetic information. The atgRNA is capable for instance, without limitation, of (i) identifying the target nucleotide sequence to be edited and (ii) encoding new genetic information that replaces (or in some cases adds) the targeted sequence. In some embodiments, the atgRNA is capable of (i) identifying the target nucleotide sequence to be edited and (ii) encoding an integration site that replaces (or inserts/deletes within) the targeted sequences.

[0250] In some embodiments, the co-delivery system described herein includes a polynucleotide sequence encoding an attachment site-containing guide RNA (atgRNA) packaged in an LNP. In some embodiments, the co-delivery system described herein includes a vector comprising a polynucleotide sequence encoding an atgRNA. In some embodiments, the atgRNA comprises a domain that is capable of guiding the prime editor fusion protein to a target sequence, thereby identifying the target nucleotide sequence to be edited; and a reverse transcriptase (RT) template that comprises a first integration recognition site. In some embodiments, the atgRNA comprises a domain that is capable of guiding the prime editor fusion protein (or prime editor system) to a target sequence, thereby identifying the target nucleotide sequence to be edited; and a reverse transcriptase (RT) template that comprises at least a portion first integration recognition site.

[0251] In some embodiments, the co-delivery system described herein includes a polynucleotide sequence encoding a first attachment site-containing guide RNA (atgRNA) and a polynucleotide nucleotide sequence encoding a second attachment site-containing guide RNA (atgRNA) packaged into the same LNP. In some embodiments, the co-delivery system described herein includes a polynucleotide sequence encoding a first attachment site-containing guide RNA (atgRNA) packaged into a first LNP and a polynucleotide nucleotide sequence encoding a second attachment site-containing guide RNA (atgRNA) packaged into a second LNP.

[0252] In some embodiments, the co-delivery system described herein includes a vector comprising a polynucleotide sequence encoding a first attachment site-containing guide RNA (atgRNA), a polynucleotide sequence encoding a second atgRNA, or both.

[0253] In some embodiments, the co-delivery system described herein includes a polynucleotide sequence encoding a first attachment site-containing guide RNA (atgRNA) packaged into a first LNP and a vector comprising a polynucleotide sequence encoding a second atgRNA.

[0254] In some embodiments, where the co-delivery system contains a first atgRNA and a second atgRNA, the first atgRNA and the second atgRNA are an at least first pair of atgRNAs, where the at least first pair of atgRNAs have domains that are capable of guiding the gene editor protein or prime editor fusion protein to a target sequence, the first atgRNA further includes a first RT template that comprises at least a portion of the first integration recognition site; and the second atgRNA further includes a second RT template that comprises at least a portion of the first integration recognition site, and the first atgRNA and the second atgRNAs collectively encode the entirety of the first integration recognition site.

[0255] In some embodiments, the first atgRNA's reverse transcriptase template encodes for a first single-stranded DNA sequence (i.e., a first DNA flap) that contains a complementary region to a second single-stranded DNA sequence (i.e., a second DNA flap) encoded by a second atgRNA comprising a second reverse transcriptase template. In certain embodiments, the complementary region between the first and second single-stranded DNA sequences is comprised of more than 5 consecutive bases of an integrase target recognition site. In certain embodiments, the complementary region between the first and second single-stranded DNA sequences is comprised of more than 10 consecutive bases of an integrase target recognition site. In certain embodiments, the complementary region between the first and second single-stranded DNA sequences is comprised of more than 20 consecutive bases of an integrase target recognition site. In certain embodiments, the complementary region between the first and second single-stranded DNA sequences is comprised of more than 30 consecutive bases of an integrase target recognition site. Use of two guide RNAs that are (or encode DNA that is) partially complementarity to each other and comprised of consecutive bases of an integrase target recognition site are referred to as dual, paired, annealing, complementary, or twin attachment site-containing guide RNAs (atgRNAs). In certain embodiments, use of two guide RNAs that are (or encode DNA that is) full complementarity to each other and comprised of consecutive bases of an integrase target recognition site are referred to as dual, paired, annealing, complementary, or twin attachment site-containing guide RNAs (atgRNAs).

[0256] In some embodiments, upon introducing the nucleic acid construct into a cell, the first atgRNA incorporates the first integration recognition site into the cell's genome at the target sequence.

[0257] Table 9 includes atgRNAs, sgRNAs and nicking guides that can be used herein. Spacers are labeled in capital font (SPACER), RT regions in bold capital (RT REGION), AttB sites in bold lower case (attB site), and PBS in capital italics (PBS). Unless otherwise denoted, the AttB is for Bxb1.

TABLE 9

| | | SEQ ID |
|---|---|---|
| Description | Sequence (5′-3′) | NO |
| ACTB N-term | GCTATTCTCGCAGCTCACCAgttttagagctagaaatagcaagttaaaataaggctagtccgtt | 212 |
| PBS 13 RT | atcaacttgaaaaagtggcaccgagtcggtgcGACGAGCGCGGCGATATCATCATCCA | |
| 29 AttB 46 | TGGccggatgatcctgacgacggagaccgccgtcgtcgacaagccggcc | |
| atgRNA | TGAGCTGCGAGAA | |
| ACTB N-term | GCTATTCTCGCAGCTCACCAgtttgagagctatgctggaaacagcatagcaagttcaaataa | 213 |
| PBS 13 RT | ggctagtccgttatcaacttgaaaaagtggcaccgagtcggtgcGACGAGCGCGGCGATATC | |
| 29 AttB 46 | ATCATCCATGGccggatgatcctgacgacggagaccgccgtcgtcgacaagccggcc | |
| atgRNA with v2 | TGAGCTGCGA GAA | |
| scaffold | | |
| ACTB N-term | GCTATTCTCGCAGCTCACCAgttttagagctagaaatagcaagttaaaataaggctagtccgtt | 214 |
| PBS_13_RT_29 | atcaacttgaaaaagtggcaccgagtcggtgcGAGTCGGTGCGACGAGCGCGGCG | |
| with TP901-1 | ATATCATCATCCATGGcacaattaacatctcaatcaaggtaaa | |
| minimal AttB f | TGCTTGAGCTGCGAGAA | |
| atgRNA | | |
| ACTB N-term | GCTATTCTCGCAGCTCACCAgttttagagctagaaatagcaagttaaaataaggctagtccgtt | 215 |
| PBS_13_RT_29 | atcaacttgaaaaagtggcaccgagtcggtgcGAGTCGGTGCGACGAGCGCGGCG | |
| with TP901-1 | ATATCATCATCCATGGagcatttaccttgattgagatgttaattgtg | |
| minimal AttB rc | TGAGCTGCGAGAA | |
| atgRNA | | |
| ACTB N-term | GCTATTCTCGCAGCTCACCAgttttagagctagaaatagcaagttaaaataaggctagtccgtt | 216 |
| PBS_13_RT_29 | atcaacttgaaaaagtggcaccgagtcggtgcGAGTCGGTGCGACGAGCGCGGCG | |
| with PhiBT1 | ATATCATCATCCATGGcaggtttttgacgaaagtgatccagatgatccag | |
| minimal AttB f | TGAGCTGCGAGAA | |
| atgRNA | | |
| ACTB N-term | GCTATTCTCGCAGCTCACCAgttttagagctagaaatagcaagttaaaataaggctagtccgtt | 217 |
| PBS_13_RT_29 | atcaacttgaaaaagtggcaccgagtcggtgcGAGTCGGTGCGACGAGCGCGGCG | |
| with PhiBT1 | ATATCATCATCCATGGctggatcatctggatcactttcgtcaaaaacctg | |
| minimal AttB rc | TGAGCTGCGAGAA | |
| atgRNA | | |
| ACTB N-term | GAAGCCGGCCTTGCACATGCgttttagagctagaaatagcaagttaaaataaggctagtccg | 218 |
| Nicking guide 1 | ttat caacttgaaaaagtggcaccgagtcggtgc | |
| +48 guide | | |
| ACTB N-term | GAAGCCGGCCTTGCACATGCgttttagagctagaaatagcaagttaaaataaggctagtccg | 219 |
| PBS_18_RT_16 | ttatcaacttgaaaaagtggcaccgagtcggtgcATATCATCATCCATGGtaccgttcgtatag | |
| with_Lo x71_Cre | catacattatacgaagttat | |
| atgRNA | TGAGCTGCGAGAATAGCC | |
| ACTB N-term | GAAGCCGGCCTTGCACATGCgttttagagctagaaatagcaagttaaaataaggctagtccg | 220 |
| PBS_13_RT_29 | ttatcaacttgaaaaagtggcaccgagtcggtgcGACGAGCGCGGCGATATCATCATCC | |
| with_Lo x71_Cre | ATGGtaccgttcgtatagcatacattatacgaagttat | |
| atgRNA | TGAGCTGCGAGAA | |
| ACTB N-term | GCTATTCTCGCAGCTCACCAgttttagagctagaaatagcaagttaaaataaggctagtccgtt | 221 |
| PBS 13 RT | atcaacttgaaaaagtggcaccgagtcggtgcTCGACGACGAGCGCGGCGATATCAT | |
| 34 atgRNA | CATCCATGGccggatgatcctgacgacggagaccgccgtcgtcgacaagccggcc | |
| | TGAGCTGCGAGAA | |
| ACTB N-term | GCTATTCTCGCAGCTCACCAgttttagagctagaaatagcaagttaaaataaggctagtccgtt | 222 |
| PBS 13 RT | atcaacttgaaaaagtggcaccgagtcggtgcGAGCGCGGCGATATCATCATCCATGG | |
| 26 atgRNA | ccggatgatcctgacgacggagaccgccgtcgtcgacaagccggcc | |
| | TGAGCTGCGAGAA | |
| ACTB N-term | GCTATTCTCGCAGCTCACCAgttttagagctagaaatagcaagttaaaataaggctagtccgtt | 223 |
| PBS 13 RT | atcaacttgaaaaagtggcaccgagtcggtgcCGCGGCGATATCATCATCCATGGccgg | |
| 23 atgRNA | atgatcctgacgacggagaccgccgtcgtcgacaagccggccTGAGCTGCGAGAA | |
| ACTB N-term | GCTATTCTCGCAGCTCACCAgttttagagctagaaatagcaagttaaaataaggctagtccgtt | 224 |
| PBS 13 RT | atcaacttgaaaaagtggcaccgagtcggtgcGGCGATATCATCATCCATGGccggatga | |
| 20 atgRNA | tcctgacgacggagaccgccgtcgtcgacaagccggccTGAGCTGCGAGAA | |
| ACTB N-term | GCTATTCTCGCAGCTCACCAgttttagagctagaaatagcaagttaaaataaggctagtccgtt | 225 |
| PBS 13 RT | atcaacttgaaaaagtggcaccgagtcggtgcATATCATCATCCATGGccggatgatcctga | |
| 16 atgRNA | cgacggagaccgccgtcgtcgacaagccggccTGAGCTGCGAGAA | |
| ACTB N-term | GCTATTCTCGCAGCTCACCAgttttagagctagaaatagcaagttaaaataaggctagtccgtt | 226 |
| PBS 18 RT | atcaacttgaaaaagtggcaccgagtcggtgcTCGACGACGAGCGCGGCGATATCAT | |
| 34 atgRNA | CATCCATGGccggatgatcctgacgacggagaccgccgtcgtcgacaagccggcc | |
| | TGAGCTGCGAGAATAGCC | |
| ACTB N-term | GCTATTCTCGCAGCTCACCAgttttagagctagaaatagcaagttaaaataaggctagtccgtt | 227 |
| PBS 18 RT | atcaacttgaaaaagtggcaccgagtcggtgcGACGAGCGCGGCGATATCATCATCCA | |
| 29 atgRNA | TGGccggatgatcctgacgacggagaccgccgtcgtcgacaagccggcc | |
| | TGAGCTGCGAGAATAGCC | |
| ACTB N-term | GCTATTCTCGCAGCTCACCAgttttagagctagaaatagcaagttaaaataaggctagtccgtt | 228 |
| PBS 18 RT | atcaacttgaaaaagtggcaccgagtcggtgcATATCATCATCCATGGccggatgatcctga | |
| 16 atgRNA | cgacggagaccgccgtcgtcgacaagccggccTGAGCTGCGAGAATAGCC | |
| LMNB1 N-term | GCTGTCTCCGCCGCCCGCCAgttttagagctagaaatagcaagttaaaataaggctagtccg | 229 |
| PBS 13 RT 39 | ttatcaacttgaaaaagtggcaccgagtcggtgcCTGCCCATCCGCGGCGGCACGGGG | |
| atgRNA | GTCGCAGTCGCCATGccggatgatcctgacgacggagaccgccgtcgtcgacaagccg | |
| | gccCGGGCGGCGGAGA | |
| LMNB1 N-term | GCTGTCTCCGCCGCCCGCCAgttttagagctagaaatagcaagttaaaataaggctagtccg | 230 |
| PBS 13 RT 34 | ttatcaacttgaaaaagtggcaccgagtcggtgcCATCCGCGGCGGCACGGGGGTCGC | |
| atgRNA | AGTCGCCATGccggatgatcctgacgacggagaccgccgtcgtcgacaagccggccCG | |
| | GGCGGCGGAGA | |
| LMNB1 N-term | GCTGTCTCCGCCGCCCGCCAgttttagagctagaaatagcaagttaaaataaggctagtccg | 231 |
| PBS 13 RT 29 | ttatcaacttgaaaaagtggcaccgagtcggtgcGCGGCGGCACGGGGGTCGCAGTCG | |
| atgRNA | CCATGccggatgatcctgacgacggagaccgccgtcgtcgacaagccggccCGGGCGG | |
| | CGGAGA | |
| LMNB1 N-term | GCTGTCTCCGCCGCCCGCCAgttttagagctagaaatagcaagttaaaataaggctagtccg | 232 |
| PBS 13 RT 24 | ttatcaacttgaaaaagtggcaccgagtcggtgcGGCACGGGGGTCGCAGTCGCCATGc | |
| atgRNA | cggatgatcctgacgacggagaccgccgtcgtcgacaagccggccCGGGCGGCGGAGA | |
| LMNB1 N-term | GCTGTCTCCGCCGCCCGCCAgttttagagctagaaatagcaagttaaaataaggctagtccg | 233 |
| PBS 13 RT 19 | ttatcaacttgaaaaagtggcaccgagtcggtgcGGGGGTCGCAGTCGCCATGccggatg | |
| atgRNA | atcctgacgacggagaccgccgtcgtcgacaagccggccCGGGCGGCGGAGA | |
| LMNB1 N-term | GCTGTCTCCGCCGCCCGCCAgttttagagctagaaatagcaagttaaaataaggctagtccg | 234 |
| PBS 18 RT 39 | ttatcaacttgaaaaagtggcaccgagtcggtgcCTGCCCATCCGCGGCGGCACGGGG | |
| atgRNA | GTCGCAGTCGCCATGccggatgatcctgacgacggagaccgccgtcgtcgacaagccg | |
| | gccCGGGCGGCGGAGACAGCG | |
| LMNB1 N-term | GCTGTCTCCGCCGCCCGCCAgttttagagctagaaatagcaagttaaaataaggctagtccg | 235 |
| PBS 18 RT 34 | ttatcaacttgaaaaagtggcaccgagtcggtgcCATCCGCGGCGGCACGGGGGTCGC | |
| atgRNA | AGTCGCCATGccggatgatcctgacgacggagaccgccgtcgtcgacaagccggccCG | |
| | GGCGGCGGAGACAGCG | |
| LMNB1 N-term | GCTGTCTCCGCCGCCCGCCAgttttagagctagaaatagcaagttaaaataaggctagtccg | 236 |
| PBS 18 RT 29 | ttatcaacttgaaaaagtggcaccgagtcggtgcGCGGCGGCACGGGGGTCGCAGTCG | |
| atgRNA | CCATGccggatgatcctgacgacggagaccgccgtcgtcgacaagccggccCGGGCGG | |
| | CGGAGACAGCG | |
| LMNB1 N-term | GCTGTCTCCGCCGCCCGCCAgttttagagctagaaatagcaagttaaaataaggctagtccg | 237 |
| PBS 18 RT 24 | ttatcaacttgaaaaagtggcaccgagtcggtgcGGCACGGGGGTCGCAGTCGCCATGc | |
| atgRNA | cggatgatcctgacgacggagaccgccgtcgtcgacaagccggccCGGGCGGCGGAGA | |
| | CAGCG | |
| LMNB1 N-term | GCTGTCTCCGCCGCCCGCCAgttttagagctagaaatagcaagttaaaataaggctagtccg | 238 |
| PBS 18 RT 19 | ttatcaacttgaaaaagtggcaccgagtcggtgcGGGGGTCGCAGTCGCCATGccggatg | |
| atgRNA | atcctgacgacggagaccgccgtcgtcgacaagccggccCGGGCGGCGGAGACAGC | |
| | G | |
| LMNB1 N-term | GCGTGGTGGGGCCGCCAGCGgttttagagctagaaatagcaagttaaaataaggctagtcc | 239 |
| Nicking guide 1 | gttatcaacttgaaaaagtggcaccgagtcggtgc | |
| +46 | | |
| ACTB N-term | GCTATTCTCGCAGCTCACCAgttttagagctagaaatagcaagttaaaataaggctagtccgtt | 240 |
| PBS 13 RT | atcaacttgaaaaagtggcaccgagtcggtgcGACGAGCGCGGCGATATCATCATCCA | |
| 29 AttB 42 | TGGggatgatcctgacgacggagaccgccgtcgtcgacaagccgg | |
| atgRNA | TGAGCTGCGAGAA | |
| ACTB N-term | GCTATTCTCGCAGCTCACCAgttttagagctagaaatagcaagttaaaataaggctagtccgtt | 241 |
| PBS 13 RT | atcaacttgaaaaagtggcaccgagtcggtgcGACGAGCGCGGCGATATCATCATCCA | |
| 29 AttB 40 | TGGgatgatcctgacgacggagaccgccgtcgtcgacaagccgTGAGCTGCGAGAA | |
| atgRNA | | |
| ACTB N-term | GCTATTCTCGCAGCTCACCAgttttagagctagaaatagcaagttaaaataaggctagtccgtt | 242 |
| PBS 13 RT | atcaacttgaaaaagtggcaccgagtcggtgcGACGAGCGCGGCGATATCATCATCCA | |
| 29 AttB 38 | TGGatgatcctgacgacggagaccgccgtcgtcgacaagccTGAGCTGCGAGAA | |
| atgRNA | | |
| ACTB N-term | GCTATTCTCGCAGCTCACCAgttttagagctagaaatagcaagttaaaataaggctagtccgtt | 243 |
| PBS 13 RT | atcaacttgaaaaagtggcaccgagtcggtgcGACGAGCGCGGCGATATCATCATCCA | |
| 29 AttB 36 | TGGtgatcctgacgacggagaccgccgtcgtcgacaagc | |
| atgRNA | TGAGCTGCGAGAA | |
| LMNB1 N-term | GCTGTCTCCGCCGCCCGCCAgttttagagctagaaatagcaagttaaaataaggctagtccg | 244 |
| PBS 13 | ttatcaacttgaaaaagtggcaccgagtcggtgcGCGGCGGCACGGGGGTCGCAGTCG | |
| RT 29 AttB 44 | CCATGcggatgatcctgacgacggagaccgccgtcgtcgacaagccggcCGGGCGGC | |
| atgRNA v2 | GGAGA | |
| LMNB1 N-term | GCTGTCTCCGCCGCCCGCCAgttttagagctagaaatagcaagttaaaataaggctagtccg | 245 |
| PBS 13 | ttatcaacttgaaaaagtggcaccgagtcggtgcGCGGCGGCACGGGGGTCGCAGTCG | |
| RT 29 AttB 42 | CCATGggatgatcctgacgacggagaccgccgtcgtcgacaagccggCGGGCGGCGG | |
| atgRNA v2 | AGA | |
| LMNB1 N-term | GCTGTCTCCGCCGCCCGCCAgttttagagctagaaatagcaagttaaaataaggctagtccg | 246 |
| PBS 13 | ttatcaacttgaaaaagtggcaccgagtcggtgcGCGGCGGCACGGGGGTCGCAGTCG | |
| RT 29 AttB 40 | CCATGgatgatcctgacgacggagaccgccgtcgtcgacaagccgCGGGCGGCGGAG | |
| atgRNA v2 | A | |
| LMNB1 N-term | GCTGTCTCCGCCGCCCGCCAgttttagagctagaaatagcaagttaaaataaggctagtccg | 247 |
| PBS 13 | ttatcaacttgaaaaagtggcaccgagtcggtgcGCGGCGGCACGGGGGTCGCAGTCG | |
| RT 29 AttB 38 | CCATGatgatcctgacgacggagaccgccgtcgtcgacaagccCGGGCGGCGGAGA | |
| atgRNA v2 | | |
| NOLC1 N-term | GCGTATTGCCTGGAGGATGGgttttagagctagaaatagcaagttaaaataaggctagtccg | 248 |
| PBS 18 | ttatcaacttgaaaaagtggcaccgagtcggtgcGAACCACGCGGCGAATGCCGGCGT | |
| RT 29 AttB 46 | CCGCCccggatgatcctgacgacggagaccgccgtcgtcgacaagccggccTCCTCCA | |
| atgRNA | GGCAATACGCG | |
| NOLC1 N-term | GCGTATTGCCTGGAGGATGGgttttagagctagaaatagcaagttaaaataaggctagtccg | 249 |
| PBS 13 | ttatcaacttgaaaaagtggcaccgagtcggtgcGAACCACGCGGCGAATGCCGGCGT | |
| RT 29 AttB 46 | CCGCCccggatgatcctgacgacggagaccgccgtcgtcgacaagccggccTCCTCCA | |
| atgRNA | GGCAAT | |
| NOLC1 N-term | GCGTATTGCCTGGAGGATGGgttttagagctagaaatagcaagttaaaataaggctagtccg | 250 |
| PBS 13 | ttatcaacttgaaaaagtggcaccgagtcggtgcGAACCACGCGGCGAATGCCGGCGT | |
| RT 29 AttB 44 | CCGCCcggatgatcctgacgacggagaccgccgtcgtcgacaagccggcTCCTCCAGG | |
| atgRNA | CAAT | |
| NOLC1 N-term | GCGTATTGCCTGGAGGATGGgttttagagctagaaatagcaagttaaaataaggctagtccg | 251 |
| PBS 13 | ttatcaacttgaaaaagtggcaccgagtcggtgcGAACCACGCGGCGAATGCCGGCGT | |
| RT 29 AttB 42 | CCGCCggatgatcctgacgacggagaccgccgtcgtcgacaagccggTCCTCCAGGCA | |
| atgRNA | AT | |
| NOLC1 N-term | GCGTATTGCCTGGAGGATGGgttttagagctagaaatagcaagttaaaataaggctagtccg | 252 |
| PBS 13 | ttatcaacttgaaaaagtggcaccgagtcggtgcGAACCACGCGGCGAATGCCGGCGT | |
| RT 29 AttB 40 | CCGCCgatgatcctgacgacggagaccgccgtcgtcgacaagccgTCCTCCAGGCAA | |
| atgRNA | T | |
| NOLC1 N-term | GCGTATTGCCTGGAGGATGGgttttagagctagaaatagcaagttaaaataaggctagtccg | 253 |
| PBS 13 | ttatcaacttgaaaaagtggcaccgagtcggtgcGAACCACGCGGCGAATGCCGGCGT | |
| RT 29 AttB 38 | CCGCCatgatcctgacgacggagaccgccgtcgtcgacaagccTCCTCCAGGCAAT | |
| atgRNA | | |
| NOLC1 nicking | GAGCCGAGCACGAGGGGATACgttttagagctagaaatagcaagttaaaataaggctagtc | 254 |
| guide -43 | cgttatcaacttgaaaaagtggcaccgagtcggtgc | |
| ACTB N-term | GCTATTCTCGCAGCTCACCAgttttagagctagaaatagcaagttaaaataaggctagtccgtt | 255 |
| PBS 13 RT | atcaacttgaaaaagtggcaccgagtcggtgcGGCGATATCATCATCCATGGatgatcctg | |
| 20 AttB 38 | acgacggagaccgccgtcgtcgacaagccTGAGCTGCGAGAA | |
| atgRNA | | |
| ACTB N-term | GCTATTCTCGCAGCTCACCAgttttagagctagaaatagcaagttaaaataaggctagtccgtt | 256 |
| PBS 13 RT | atcaacttgaaaaagtggcaccgagtcggtgcTATCATCATCCATGGatgatcctgacgacg | |
| 15 AttB 38 | gagaccgccgtcgtcgacaagcc | |
| atgRNA | TGAGCTGCGAGAA | |
| ACTB N-term | GCTATTCTCGCAGCTCACCAgttttagagctagaaatagcaagttaaaataaggctagtccgtt | 257 |
| PBS 13 RT | atcaacttgaaaaagtggcaccgagtcggtgcTCATCCATGGatgatcctgacgacggagacc | |
| 10 AttB 38 | gccgtcgtcgacaagcc | |
| atgRNA | TGAGCTGCGAGAA | |
| ACTB N-term | GCTATTCTCGCAGCTCACCAgttttagagctagaaatagcaagttaaaataaggctagtccgtt | 258 |
| PBS 9 RT | atcaacttgaaaaagtggcaccgagtcggtgcGGCGATATCATCATCCATGGatgatcctg | |
| 20 AttB 38 | acgacggagaccgccgtcgtcgacaagcc | |
| atgRNA | TGAGCTGCG | |
| ACTB N-term | GCTATTCTCGCAGCTCACCAgttttagagctagaaatagcaagttaaaataaggctagtccgtt | 259 |
| PBS 9 RT | atcaacttgaaaaagtggcaccgagtcggtgcTATCATCATCCATGGatgatcctgacgacg | |
| 15 AttB 38 | gagaccgccgtcgtcgacaagcc | |
| atgRNA | TGAGCTGCG | |
| ACTB N-term | GCTATTCTCGCAGCTCACCAgttttagagctagaaatagcaagttaaaataaggctagtccgtt | 260 |
| PBS 9 RT | atcaacttgaaaaagtggcaccgagtcggtgcTCATCCATGGatgatcctgacgacggagacc | |
| 10 AttB 38 | gccgtcgtcgacaagcc | |
| atgRNA | TGAGCTGCG | |
| LMNB1 N-term | GCTGTCTCCGCCGCCCGCCAgttttagagctagaaatagcaagttaaaataaggctagtccg | 261 |
| PBS 13 | ttatcaacttgaaaaagtggcaccgagtcggtgcCGGGGGTCGCAGTCGCCATGatgatcc | |
| RT 20 AttB 38 | tgacgacggagaccgccgtcgtcgacaagccCGGGCGGCGGAGA | |
| atgRNA | | |
| LMNB1 N-term | GCTGTCTCCGCCGCCCGCCAgttttagagctagaaatagcaagttaaaataaggctagtccg | 262 |
| PBS 13 | ttatcaacttgaaaaagtggcaccgagtcggtgcGTCGCAGTCGCCATGatgatcctgacgac | |
| RT 15 AttB 38 | ggagaccgccgtcgtcgacaagccCGGGCGGCGGAGA | |
| atgRNA | | |
| LMNB1 N-term | GCTGTCTCCGCCGCCCGCCAgttttagagctagaaatagcaagttaaaataaggctagtccg | 263 |
| PBS 13 | ttatcaacttgaaaaagtggcaccgagtcggtgcAGTCGCCATGatgatcctgacgacggagac | |
| RT 10 AttB 38 | cgccgtcgtcgacaagccCGGGCGGCGGAGA | |
| atgRNA | | |
| LMNB1 N-term | GCTGTCTCCGCCGCCCGCCAgttttagagctagaaatagcaagttaaaataaggctagtccg | 264 |
| PBS 9 | ttatcaacttgaaaaagtggcaccgagtcggtgcCGGGGGTCGCAGTCGCCATGatgatcc | |
| RT 20 AttB 38 | tgacgacggagaccgccgtcgtcgacaagccCGGGCGGCG | |
| atgRNA | | |
| LMNB1 N-term | GCTGTCTCCGCCGCCCGCCAgttttagagctagaaatagcaagttaaaataaggctagtccg | 265 |
| PBS 9 | ttatcaacttgaaaaagtggcaccgagtcggtgcGTCGCAGTCGCCATGatgatcctgacgac | |
| RT 15 AttB 38 | ggagaccgccgtcgtcgacaagccCGGGCGGCG | |
| atgRNA | | |
| LMNB1 N-term | GCTGTCTCCGCCGCCCGCCAgttttagagctagaaatagcaagttaaaataaggctagtccg | 266 |
| PBS 9 | ttatcaacttgaaaaagtggcaccgagtcggtgcAGTCGCCATGatgatcctgacgacggagac | |
| RT 10 AttB 38 | cgccgtcgtcgacaagccCGGGCGGCG | |
| atgRNA | | |
| SUPT16H N-term | GAGAAGCGGCGTCCGGGGCTAgttttagagctagaaatagcaagttaaaataaggctagtc | 267 |
| PBS 13 | cgttatcaacttgaaaaagtggcaccgagtcggtgcTCTTTGTCCAGAGTCACAGCCATA | |
| RT 24 Bxb1- | ccggatgatcctgacgacggagaccgccgtcgtcgacaagccggccCCCCGGACGCCG | |
| GT_Initial length | C | |
| SRRM2 N-term | GGGCACGGGGCCATGTACAAgttttagagctagaaatagcaagttaaaataaggctagtccg | 268 |
| PBS 13 | ttatcaacttgaaaaagtggcaccgagtcggtgcGGCGTCGGCAGCCCGATCCCGTTGc | |
| RT 24 Bxb1 Initial | cggatgatcctgacgacggagaccgccgtcgtcgacaagccggccTACATGGCCCCGT | |
| length | | |
| DEPDC4 N-term | GTGTCAGGTGGGGCGGGGCTAgttttagagctagaaatagcaagttaaaataaggctagtc | 269 |
| PBS 18 | cgttatcaacttgaaaaagtggcaccgagtcggtgcGCTGGCTCCTCCCCTGGCACCATA | |
| RT 24 Bxb1 Initial | ccggatgatcctgacgacggagaccgccgtcgtcgacaagccggccCCCCGCCCCACC | |
| length | TGACAC | |
| NES N-term PBS | GAGTGGGTCAGACGAGCAGGAgttttagagctagaaatagcaagttaaaataaggctagtc | 270 |
| 13 RT | cgttatcaacttgaaaaagtggcaccgagtcggtgcCGACTCCTCCCCCATGCAGCCCTC | |
| 29 Bxb1 Initial | CATCccggatgatcctgacgacggagaccgccgtcgtcgacaagccggcc | |
| length | TGCTCGTCTGACC | |
| SUPT 16H nicking | GCAGCCACCCGCTCTCGGCCCgttttagagctagaaatagcaagttaaaataaggctagtc | 271 |
| guide −53 | cgttatcaacttgaaaaagtggcaccgagtcggtgc | |
| SRRM2 N-term | GTGTAGTCAGGCCGCTCACCCgttttagagctagaaatagcaagttaaaataaggctagtcc | 272 |
| nicking guide 1 | gttatcaacttgaaaaagtggcaccgagtcggtgc | |
| +87 | | |
| DEPDC4 N-term | GCTGACAAGTCTACGGAACCTgttttagagctagaaatagcaagttaaaataaggctagtcc | 273 |
| Nicking guide 1 | gttatcaacttgaaaaagtggcaccgagtcggtgc | |
| +59 | | |
| NES N-term | GCTCCTCCAGCGCCTTGACCgttttagagctagaaatagcaagttaaaataaggctagtccgt | 274 |
| Nicking guide 2 | tatcaacttgaaaaagtggcaccgagtcggtgc | |
| +79 | | |
| HITI_ACTB_ | GCTATTCTCGCAGCTCACCAgttttagagctagaaatagcaagttaaaataaggctagtccgtt | 275 |
| guide | atcaacttgaaaaagtggcaccgagtcggtgc | |
| HITI_SUPTH16_ | AGAAGCGGCGTCCGGGGCTAgttttagagctagaaatagcaagttaaaataaggctagtcc | 276 |
| guide | gttatcaacttgaaaaagtggcaccgagtcggtgc | |
| HITI_SRRM2_ | GGGCACGGGGCCATGTACAAgttttagagctagaaatagcaagttaaaataaggctagtccg | 277 |
| guide | ttatcaacttgaaaaagtggcaccgagtcggtgc | |
| HITI_NOLC1_ | GCGTATTGCCTGGAGGATGGgttttagagctagaaatagcaagttaaaataaggctagtccg | 278 |
| guide | ttatcaacttgaaaaagtggcaccgagtcggtgc | |
| HITI_DEPDC4_ | TGTCAGGTGGGGCGGGGCTAgttttagagctagaaatagcaagttaaaataaggctagtcc | 279 |
| guide | gttatcaacttgaaaaagtggcaccgagtcggtgc | |
| HITI_NES_ | AGTGGGTCAGACGAGCAGGAgttttagagctagaaatagcaagttaaaataaggctagtccg | 280 |
| guide | ttatcaacttgaaaaagtggcaccgagtcggtgc | |
| HITI_LMNB1_ | GCTGTCTCCGCCGCCCGCCAgttttagagctagaaatagcaagttaaaataaggctagtccg | 281 |
| guide | ttatcaacttgaaaaagtggcaccgagtcggtgc | |
| HDR Cas9 ACTB | GCTATTCTCGCAGCTCACCAgttttagagctagaaatagcaagttaaaataaggctagtccgtt | 275 |
| guide | atcaacttgaaaaagtggcaccgagtcggtgc | |
| HDR Cas9 | GGGGTCGCAGTCGCCATGGCgttttagagctagaaatagcaagttaaaataaggctagtcc | 282 |
| LMNB1 guide | gttatcaacttgaaaaagtggcaccgagtcggtgc | |
| ACTB N-term | GCTATTCTCGCAGCTCACCAgttttagagctagaaatagcaagttaaaataaggctagtccgtt | 283 |
| PBS 13 RT | atcaacttgaaaaagtggcaccgagtcggtgcGACGAGCGCGGCGATATCATCATCCA | |
| 29 AttB original | TGGccggatgatcctgacgacggagXXcgccgtcgtcgacaagccggccTGAGCTGCG | |
| length atgRNAs | AGAA | |
| for dinucleotides | XX: CG, GC, AT, TA, GG, TT, GA, AG, CC, TC, CT, AA, TG, GT, CA, AC | |
| ACTB N-term | GCTATTCTCGCAGCTCACCAgttttagagctagaaatagcaagttaaaataaggctagtccgtt | 284 |
| PBS 13 RT | atcaacttgaaaaagtggcaccgagtcggtgcGACGAGCGCGGCGATATCATCATCCA | |
| 29 atgRNA with | TGccggatgatcctgacgacggagACcgccgtcgtcgacaagccggccTGAGCTGCGA | |
| AttB 46 GT for | GAA | |
| fusion | | |
| ACTB N-term | GCTATTCTCGCAGCTCACCAgttttagagctagaaatagcaagttaaaataaggctagtccgtt | 285 |
| PBS 13 RT | atcaacttgaaaaagtggcaccgagtcggtgcGACGAGCGCGGCGATATCATCATCCA | |
| 29 atgRNA with | TGccggatgatcctgacgacggagAGcgccgtcgtcgacaagccggccTGAGCTGCGA | |
| AttB 46 CT for | GAA | |
| multiplexing | | |
| NOLC1 N-term | GCGTATTGCCTGGAGGATGGgttttagagctagaaatagcaagttaaaataaggctagtccg | 286 |
| PBS 18 | ttatcaacttgaaaaagtggcaccgagtcggtgcGAACCACGCGGCGAATGCCGGCGT | |
| RT 29 atgRNA | CCGCCccggatgatcctgacgacggagTCcgccgtcgtcgacaagccggccTCCTCCA | |
| with AttB 46 GA | GGCAATACGCG | |
| for multiplexing | | |
| LMNB1 N-term | GCTGTCTCCGCCGCCCGCCAgttttagagctagaaatagcaagttaaaataaggctagtccg | 287 |
| PBS 18 | ttatcaacttgaaaaagtggcaccgagtcggtgcGCGGCGGCACGGGGGTCGCAGTCG | |
| RT 29 atgRNA | CCATGccggatgatcctgacgacggagCTcgccgtcgtcgacaagccggccCGGGCGG | |
| with AttB 46 AG | CGGAGACAGCG | |
| for multiplexing | | |
| EMX1 Cas9 | GTCACCTCCAATGACTAGGGgttttagagctagaaatagcaagttaaaataaggctagtccgt | 288 |
| guide 1 | tatcaacttgaaaaagtggcaccgagtcggtgc | |
| EMX1 Cas9 | GGGCAACCACAAACCCACGAgttttagagctagaaatagcaagttaaaataaggctagtccg | 289 |
| guide 2 | ttatcaacttgaaaaagtggcaccgagtcggtgc | |
| ACTB N-term | GCTATTCTCGCAGCTCACCAgttttagagctagaaatagcaagttaaaataaggctagtccgtt | 290 |
| PBS 13 RT | atcaacttgaaaaagtggcaccgagtcggtgcGACGAGCGCGGCGATATCATCATCCA | |
| 29 AttB 56 GA | TGGctatgccggatgatcctgacgacggagtccgccgtcgtcgacaagccggccctagcTGA | |
| atgRNA | GCTGCGAGAA | |
| ACTB N-term | GCTATTCTCGCAGCTCACCAgttttagagctagaaatagcaagttaaaataaggctagtccgtt | 291 |
| PBS 13 RT | atcaacttgaaaaagtggcaccgagtcggtgcGACGAGCGCGGCGATATCATCATCCA | |
| 29 AttB 51 GA | TGGtgccggatgatcctgacgacggagtccgccgtcgtcgacaagccggccctaTGAGCT | |
| atgRNA | GCGAGAA | |
| ACTB N-term | GCTATTCTCGCAGCTCACCAgttttagagctagaaatagcaagttaaaataaggctagtccgtt | 292 |
| PBS 13 RT | atcaacttgaaaaagtggcaccgagtcggtgcGACGAGCGCGGCGATATCATCATCCA | |
| 29 AttB 46 GA | TGGccggatgatcctgacgacggagtccgccgtcgtcgacaagccggccTGAGCTGCGA | |
| atgRNA | GAA | |
| ACTB N-term | GCTATTCTCGCAGCTCACCAgttttagagctagaaatagcaagttaaaataaggctagtccgtt | 293 |
| PBS 13 RT | atcaacttgaaaaagtggcaccgagtcggtgcGACGAGCGCGGCGATATCATCATCCA | |
| 29 AttB 41 GA | TGGggatgatcctgacgacggagtccgccgtcgtcgacaagccgTGAGCTGCGAGAA | |
| atgRNA | | |
| ACTB N-term | GCTATTCTCGCAGCTCACCAgttttagagctagaaatagcaagttaaaataaggctagtccgtt | 294 |
| PBS 13 RT | atcaacttgaaaaagtggcaccgagtcggtgcGACGAGCGCGGCGATATCATCATCCA | |
| 29 AttB 36 GA | TGGtgatcctgacgacggagtccgccgtcgtcgacaagcTGAGCTGCGAGAA | |
| atgRNA | | |
| ACTB N-term | GCTATTCTCGCAGCTCACCAgttttagagctagaaatagcaagttaaaataaggctagtccgtt | 295 |
| PBS 13 RT | atcaacttgaaaaagtggcaccgagtcggtgcGACGAGCGCGGCGATATCATCATCCA | |
| 29 AttB 31 GA | TGGatcctgacgacggagtccgccgtcgtcgacaTGAGCTGCGAGAA | |
| atgRNA | | |
| ACTB N-term | GCTATTCTCGCAGCTCACCAgttttagagctagaaatagcaagttaaaataaggctagtccgtt | 296 |
| PBS 13 RT | atcaacttgaaaaagtggcaccgagtcggtgcGACGAGCGCGGCGATATCATCATCCA | |
| 29 AttB 26 GA | TGGcctgacgacggagtccgccgtcgtcgTGAGCTGCGAGAA | |
| atgRNA | | |
| ACTB N-term | GCTATTCTCGCAGCTCACCAgttttagagctagaaatagcaagttaaaataaggctagtccgtt | 297 |
| PBS 13 RT | atcaacttgaaaaagtggcaccgagtcggtgcGACGAGCGCGGCGATATCATCATCCA | |
| 29 AttB 21 GA | TGGtgacgacggagtccgccgtcgTGAGCTGCGAGAA | |
| atgRNA | | |
| ACTB N-term | GCTATTCTCGCAGCTCACCAgttttagagctagaaatagcaagttaaaataaggctagtccgtt | 298 |
| PBS 13 RT | atcaacttgaaaaagtggcaccgagtcggtgcGACGAGCGCGGCGATATCATCATCCA | |
| 29 AttB 16 GA | TGGacgacggagtccgccgTGAGCTGCGAGAA | |
| atgRNA | | |
| ACTB N-term | GCTATTCTCGCAGCTCACCAgttttagagctagaaatagcaagttaaaataaggctagtccgtt | 299 |
| PBS 13 RT | atcaacttgaaaaagtggcaccgagtcggtgcGACGAGCGCGGCGATATCATCATCCA | |
| 29 AttB 11 GA | TGGgacggagtccgTGAGCTGCGAGAA | |
| atgRNA | | |
| ACTB N-term | GCTATTCTCGCAGCTCACCAgttttagagctagaaatagcaagttaaaataaggctagtccgtt | 300 |
| PBS 13 RT | atcaacttgaaaaagtggcaccgagtcggtgcGACGAGCGCGGCGATATCATCATCCA | |
| 29 AttB 6 GA | TGGcggagtTGAGCTGCGAGAA | |
| atgRNA | | |
| ACTB N-term | GAAGCCGGCCTTGCACATGCgttttagagctagaaatagcaagttaaaataaggctagtccg | 301 |
| PBS_18_RT_34 | ttatcaacttgaaaaagtggcaccgagtcggtgcTCGACGACGAGCGCGGCGATATCAT | |
| with_Lo x71_Cre | CATCCATGGtaccgttcgtatagcatacattatacgaagttatTGAGCTGCGAGAATAG | |
| atgRNA | CC | |
| ACTB N-term | GAAGCCGGCCTTGCACATGCgttttagagctagaaatagcaagttaaaataaggctagtccg | 302 |
| PBS_18_RT_29 | ttatcaacttgaaaaagtggcaccgagtcggtgcGACGAGCGCGGCGATATCATCATCC | |
| with_Lo x71_Cre | ATGGtaccgttcgtatagcatacattatacgaagttatTGAGCTGCGAGAATAGCC | |
| atgRNA | | |
| ACTB N-term | GAAGCCGGCCTTGCACATGCgttttagagctagaaatagcaagttaaaataaggctagtccg | 303 |
| PBS_13_RT_34_ | ttatcaacttgaaaaagtggcaccgagtcggtgcTCGACGACGAGCGCGGCGATATCAT | |
| with_Lo x71_Cre | CATCCATGGtaccgttcgtatagcatacattatacgaagttatTGAGCTGCGAGAA | |
| atgRNA | | |
| ACTB N-term | GAAGCCGGCCTTGCACATGCgttttagagctagaaatagcaagttaaaataaggctagtccg | 304 |
| PBS_13_RT_16 | ttatcaacttgaaaaagtggcaccgagtcggtgcATATCATCATCCATGGtaccgttcgtatag | |
| with_Lo x71_Cre | catacattatacgaagttatTGAGCTGCGAGAA | |
| atgRNA | | |
| ACTB N-term | CCCCACGATGGAGGGGAAGAgttttagagctagaaatagcaagttaaaataaggctagtccg | 305 |
| Nicking guide 2 | ttatcaacttgaaaaagtggcaccgagtcggtgc | |
| +93 guide | | |
| LMNB1 N-term | CCTTCTCCTGGAGCCGCGACgttttagagctagaaatagcaagttaaaataaggctagtccgt | 306 |
| Nicking guide 2 | tatcaacttgaaaaagtggcaccgagtcggtgc | |
| +87 guide | | |
| ACTB N-term | GCTATTCTCGCAGCTCACCAgttttagagctagaaatagcaagttaaaataaggctagtccgtt | 307 |
| PBS 13 RT 29 | atcaacttgaaaaagtggcaccgagtcggtgcGACGAGCGCGGCGATATCATCATCCA | |
| AttB 46 | TGGcattatatgttcttacagtatggcggcccggattgtaaaaacatataatgTGAGCTGCGA | |
| N191352_143_72 | GAA | |
| integrase | | |
| ACTB N-term | GCTATTCTCGCAGCTCACCAgttttagagctagaaatagcaagttaaaataaggctagtccgtt | 308 |
| PBS 13 RT | atcaacttgaaaaagtggcaccgagtcggtgcGACGAGCGCGGCGATATCATCATCCA | |
| 29 AttB 46 | TGGcgttatagggtattacagtatggcggtcggtactgcaataccctataacgTGAGCTGCG | |
| N684346_90_69 | AGAA | |
| integrase | | |
| ACTB N-term | GCTATTCTCGCAGCTCACCAgttttagagctagaaatagcaagttaaaataaggctagtccgtt | 309 |
| PBS 13 RT 29 | atcaacttgaaaaagtggcaccgagtcggtgcGACGAGCGCGGCGATATCATCATCCA | |
| AttB 46 | TGGtgtatcattttcatatagttagcacctgcacactatatgaaaatgataca | |
| N675015_95_5 | TGAGCTGCGAGAA | |
| integrase | | |
| ACTB N-term | GCTATTCTCGCAGCTCACCAgttttagagctagaaatagcaagttaaaataaggctagtccgtt | 310 |
| PBS 13 RT 29 | atcaacttgaaaaagtggcaccgagtcggtgcGACGAGCGCGGCGATATCATCATCCA | |
| AttB 46 | TGGtgtctactatctgtatatgcgacacatgtggcataaagacatagtagacaTGAGCTGCG | |
| N189929_49_54 | AGAA | |
| integrase | | |
| ACTB N-term | GCTATTCTCGCAGCTCACCAgttttagagctagaaatagcaagttaaaataaggctagtccgtt | 311 |
| PBS 13 RT 29 | atcaacttgaaaaagtggcaccgagtcggtgcGACGAGCGCGGCGATATCATCATCCA | |
| AttB 46 | TGGcatcgaccctgacgcatgcggaggcggcgctccatgcgtctgacctcattTGAGCTGC | |
| N203911_45186 | GAGAA | |
| 6 | | |
| integrase | | |
| ACTB N-term | GCTATTCTCGCAGCTCACCAgttttagagctagaaatagcaagttaaaataaggctagtccgtt | 312 |
| PBS 13 RT 29 | atcaacttgaaaaagtggcaccgagtcggtgcGACGAGCGCGGCGATATCATCATCCA | |
| AttB 46 | TGGgttagtacccaaatgacaaaaggtcatccttttatcatttgggtactaacTGAGCTGCGA | |
| N687663_53_29 | GAA | |
| integrase | | |
| ACTB N-term | GCTATTCTCGCAGCTCACCAgttttagagctagaaatagcaagttaaaataaggctagtccgtt | 313 |
| PBS 13 RT 29 | atcaacttgaaaaagtggcaccgagtcggtgcGACGAGCGCGGCGATATCATCATCCA | |
| AttB 46 | TGGcttattaaaacccgttccgcttctgtcaaagcggcatcggttttataaacTGAGCTGCGA | |
| N687611_90_68 | GAA | |
| integrase | | |
| ACTB N-term | GCTATTCTCGCAGCTCACCAgttttagagctagaaatagcaagttaaaataaggctagtccgtt | 314 |
| PBS 13 RT 29 | atcaacttgaaaaagtggcaccgagtcggtgcGACGAGCGCGGCGATATCATCATCCA | |
| AttB 46 | TGGggcgtgatggtcgtgaacctcaacatgacgacgaacacgacctcgcggccTGAGCTG | |
| N190156_234_12 | CGAGAA | |
| integrase | | |
| ACTB N-term | GCTATTCTCGCAGCTCACCAgttttagagctagaaatagcaagttaaaataaggctagtccgtt | 315 |
| PBS 13 RT 29 | atcaacttgaaaaagtggcaccgagtcggtgcGACGAGCGCGGCGATATCATCATCCA | |
| AttB 46 | TGGtctacatcttgaatatatcaagttataactttgaattatatcagtttataTGAGCTGCGAGA | |
| N191533_224_76 | A | |
| integrase | | |
| ACTB N-term | GCTATTCTCGCAGCTCACCAgttttagagctagaaatagcaagttaaaataaggctagtccgtt | 316 |
| PBS 13 RT 29 | atcaacttgaaaaagtggcaccgagtcggtgcGACGAGCGCGGCGATATCATCATCCA | |
| AttB 46 | TGGaattatatctaaaagcactaagctccgccatactgcttttagatataataTGAGCTGCGA | |
| N208621_9_15 | GAA | |
| integrase | | |
| ACTB N-term | GCTATTCTCGCAGCTCACCAgttttagagctagaaatagcaagttaaaataaggctagtccgtt | 317 |
| PBS 13 RT 29 | atcaacttgaaaaagtggcaccgagtcggtgcGACGAGCGCGGCGATATCATCATCCA | |
| AttB 46 | TGGgatatggggaagtgaatcagtacaaccgccacagtaccTGAGCTGCGAGAA | |
| Bacillus_cereus | | |
| AH187_38 bp_Att | | |
| ACTB N-term | GCTATTCTCGCAGCTCACCAgttttagagctagaaatagcaagttaaaataaggctagtccgtt | 318 |
| PBS 13 RT 29 | atcaacttgaaaaagtggcaccgagtcggtgcGACGAGCGCGGCGATATCATCATCCA | |
| AttB 46 | TGGggtactgtggcggttgtactgattcacttccccatatcTGAGCTGCGAGAA | |
| Bacillus_cereus | | |
| AH187_38 | | |
| bp_Att_rc | | |
| ACTB N-term | GCTATTCTCGCAGCTCACCAgttttagagctagaaatagcaagttaaaataaggctagtccgtt | 319 |
| PBS 13 RT 29 | atcaacttgaaaaagtggcaccgagtcggtgcGACGAGCGCGGCGATATCATCATCCA | |
| AttB 46 | TGGtgggtggtacaggtgccacattagttgtaccatttatgTGAGCTGCGAGAA | |
| Staphylococcus_ | | |
| Iugdunensis | | |
| _N920143_38 bp_ | | |
| Att | | |
| ACTB N-term | GCTATTCTCGCAGCTCACCAgttttagagctagaaatagcaagttaaaataaggctagtccgtt | 320 |
| PBS 13 RT 29 | atcaacttgaaaaagtggcaccgagtcggtgcGACGAGCGCGGCGATATCATCATCCA | |
| AttB 46 | TGGcataaatggtacaactaatgtggcacctgtaccacccaTGAGCTGCGAGAA | |
| Staphylococcus_ | | |
| Iugdunensis | | |
| N920143_38 bp | | |
| Att_rc | | |
| ACTB N-term | GCTATTCTCGCAGCTCACCAgttttagagctagaaatagcaagttaaaataaggctagtccgtt | 321 |
| PBS 13 RT 29 | atcaacttgaaaaagtggcaccgagtcggtgcGACGAGCGCGGCGATATCATCATCCA | |
| AttB 46 | TGGgttgtttttccagatccagttggtcctgtaaatataagTGAGCTGCGAGAA | |
| Bacillus_cytotoxicus | | |
| _NVH_391- | | |
| 98_38 bp_Att | | |
| ACTB N-term | GCTATTCTCGCAGCTCACCAgttttagagctagaaatagcaagttaaaataaggctagtccgtt | 322 |
| PBS 13 RT 29 | atcaacttgaaaaagtggcaccgagtcggtgcGACGAGCGCGGCGATATCATCATCCA | |
| AttB 46 | TGGcttatatttacaggaccaactggatctggaaaaacaacTGAGCTGCGAGAA | |
| Bacillus_cytotoxicus | | |
| _NVH_391- | | |
| 98_38 bp_Att_rc | | |
| ACTB N-term | GCTATTCTCGCAGCTCACCAgttttagagctagaaatagcaagttaaaataaggctagtccgtt | 323 |
| PBS 13 RT 29 | atcaacttgaaaaagtggcaccgagtcggtgcGACGAGCGCGGCGATATCATCATCCA | |
| AttB 46 | TGGgtactgtggcggttgtactgattcacttccccatatTGAGCTGCGAGAA | |
| Bacillus_cereus | | |
| AH187_Att 36 bp | | |
| ACTB N-term | GCTATTCTCGCAGCTCACCAgttttagagctagaaatagcaagttaaaataaggctagtccgtt | 324 |
| PBS 13 RT 29 | atcaacttgaaaaagtggcaccgagtcggtgcGACGAGCGCGGCGATATCATCATCCA | |
| AttB 46 | TGGtactgtggcggttgtactgattcacttccccataTGAGCTGCGAGAA | |
| Bacillus_cereus | | |
| AH187_Att 34 bp | | |
| ACTB N-term | GCTATTCTCGCAGCTCACCAgttttagagctagaaatagcaagttaaaataaggctagtccgtt | 325 |
| PBS 13 RT 29 | atcaacttgaaaaagtggcaccgagtcggtgcGACGAGCGCGGCGATATCATCATCCA | |
| AttB 46 | TGGactgtggcggttgtactgattcacttccccatTGAGCTGCGAGAA | |
| Bacillus_cereus | | |
| AH187_Att 32 bp | | |
| ACTB N-term | GCTATTCTCGCAGCTCACCAgttttagagctagaaatagcaagttaaaataaggctagtccgtt | 326 |
| PBS 13 RT 29 | atcaacttgaaaaagtggcaccgagtcggtgcGACGAGCGCGGCGATATCATCATCCA | |
| AttB 46 | TGGatatggggaagtgaatcagtacaaccgccacagtacTGAGCTGCGAGAA | |
| Bacillus_cereus | | |
| AH187_Att | | |
| rc 36 bp | | |
| ACTB N-term | GCTATTCTCGCAGCTCACCAgttttagagctagaaatagcaagttaaaataaggctagtccgtt | 327 |
| PBS 13 RT 29 | atcaacttgaaaaagtggcaccgagtcggtgcGACGAGCGCGGCGATATCATCATCCA | |
| AttB 46 | TGGtatggggaagtgaatcagtacaaccgccacagtaTGAGCTGCGAGAA | |
| Bacillus_cereus | | |
| AH187_Att | | |
| _rc 34 bp | | |
| ACTB N-term | GCTATTCTCGCAGCTCACCAgttttagagctagaaatagcaagttaaaataaggctagtccgtt | 328 |
| PBS 13 RT 29 | atcaacttgaaaaagtggcaccgagtcggtgcGACGAGCGCGGCGATATCATCATCCA | |
| AttB 46 | TGGatggggaagtgaatcagtacaaccgccacagtTGAGCTGCGAGAA | |
| Bacillus_cereus | | |
| AH187_Att | | |
| _rc 32 bp | | |
| ACTB N-term | GCTATTCTCGCAGCTCACCAgttttagagctagaaatagcaagttaaaataaggctagtccgtt | 329 |
| PBS 13 RT 29 | atcaacttgaaaaagtggcaccgagtcggtgcGACGAGCGCGGCGATATCATCATCCA | |
| AttB 46 | TGGataaatggtacaactaatgtggcacctgtaccacccTGAGCTGCGAGAA | |
| Staphylococcus_ | | |
| Iugdunensis | | |
| N920143_Att | | |
| 36 bp | | |
| ACTB N-term | GCTATTCTCGCAGCTCACCAgttttagagctagaaatagcaagttaaaataaggctagtccgtt | 330 |
| PBS 13 RT 29 | atcaacttgaaaaagtggcaccgagtcggtgcGACGAGCGCGGCGATATCATCATCCA | |
| AttB 46 | TGGtaaatggtacaactaatgtggcacctgtaccaccTGAGCTGCGAGAA | |
| Staphylococcus_ | | |
| Iugdunensis | | |
| N920143_Att | | |
| 34 bp | | |
| ACTB N-term | GCTATTCTCGCAGCTCACCAgttttagagctagaaatagcaagttaaaataaggctagtccgtt | 331 |
| PBS 13 RT 29 | atcaacttgaaaaagtggcaccgagtcggtgcGACGAGCGCGGCGATATCATCATCCA | |
| AttB 46 | TGGaaatggtacaactaatgtggcacctgtaccacTGAGCTGCGAGAA | |
| Staphylococcus_ | | |
| Iugdunensis | | |
| N920143_Att | | |
| 32 bp | | |
| ACTB N-term | GCTATTCTCGCAGCTCACCAgttttagagctagaaatagcaagttaaaataaggctagtccgtt | 332 |
| PBS 13 RT 29 | atcaacttgaaaaagtggcaccgagtcggtgcGACGAGCGCGGCGATATCATCATCCA | |
| AttB 46 | TGGgggggtacaggtgccacattagttgtaccatttatTGAGCTGCGAGAA | |
| Staphylococcus_ | | |
| Iugdunensis | | |
| N920143_Att_rc | | |
| 36 bp | | |
| ACTB N-term | GCTATTCTCGCAGCTCACCAgttttagagctagaaatagcaagttaaaataaggctagtccgtt | 333 |
| PBS 13 RT 29 | atcaacttgaaaaagtggcaccgagtcggtgcGACGAGCGCGGCGATATCATCATCCA | |
| AttB 46 | TGGggtggtacaggtgccacattagttgtaccatttaTGAGCTGCGAGAA | |
| Staphylococcus_ | | |
| Iugdunensis | | |
| N920143_Att_rc | | |
| 34 bp | | |
| ACTB N-term | GCTATTCTCGCAGCTCACCAgttttagagctagaaatagcaagttaaaataaggctagtccgtt | 334 |
| PBS 13 RT 29 | atcaacttgaaaaagtggcaccgagtcggtgcGACGAGCGCGGCGATATCATCATCCA | |
| AttB 46 | TGGgtggtacaggtgccacattagttgtaccatttTGAGCTGCGAGAA | |
| Staphylococcus_ | | |
| Iugdunensis | | |
| N920143_Att_rc | | |
| 32 bp | | |
| ACTB N-term | GCTATTCTCGCAGCTCACCAgttttagagctagaaatagcaagttaaaataaggctagtccgtt | 335 |
| PBS 13 RT 29 | atcaacttgaaaaagtggcaccgagtcggtgcGACGAGCGCGGCGATATCATCATCCA | |
| AttB 46 Bacillus | TGGttatatttacaggaccaactggatctggaaaaacaaTGAGCTGCGAGAA | |
| _cytotoxicus | | |
| _NVH_ 391- | | |
| 98_Att 36 bp | | |
| ACTB N-term | GCTATTCTCGCAGCTCACCAgttttagagctagaaatagcaagttaaaataaggctagtccgtt | 336 |
| PBS 13 RT 29 | atcaacttgaaaaagtggcaccgagtcggtgcGACGAGCGCGGCGATATCATCATCCA | |
| AttB 46 | TGGtatatttacaggaccaactggatctggaaaaacaTGAGCTGCGAGAA | |
| Bacillus_ | | |
| cytotoxicus_ | | |
| NVH_391- | | |
| 98_Att 34 bp | | |
| ACTB N-term | GCTATTCTCGCAGCTCACCAgttttagagctagaaatagcaagttaaaataaggctagtccgtt | 337 |
| PBS 13 RT 29 | atcaacttgaaaaagtggcaccgagtcggtgcGACGAGCGCGGCGATATCATCATCCA | |
| AttB 46 Bacillus | TGGatatttacaggaccaactggatctggaaaaacTGAGCTGCGAGAA | |
| _cytotoxicus | | |
| _NVH_ 391- | | |
| 98_Att 32 bp | | |
| ACTB N-term | GCTATTCTCGCAGCTCACCAgttttagagctagaaatagcaagttaaaataaggctagtccgtt | 338 |
| PBS 13 RT 29 | atcaacttgaaaaagtggcaccgagtcggtgcGACGAGCGCGGCGATATCATCATCCA | |
| AttB 46 | TGGttgtttttccagatccagttggtcctgtaaatataaTGAGCTGCGAGAA | |
| Bacillus_ | | |
| cytotoxicus_ | | |
| NVH_ 391- | | |
| 98_Att_rc 36 bp | | |
| ACTB N-term | GCTATTCTCGCAGCTCACCAgttttagagctagaaatagcaagttaaaataaggctagtccgtt | 339 |
| PBS 13 RT 29 | atcaacttgaaaaagtggcaccgagtcggtgcGACGAGCGCGGCGATATCATCATCCA | |
| AttB 46 Bacillus | TGGtgtttttccagatccagttggtcctgtaaatataTGAGCTGCGAGAA | |
| _cytotoxicus | | |
| _NVH_391- | | |
| 98_Att_rc 34 bp | | |
| ACTB N-term | GCTATTCTCGCAGCTCACCAgttttagagctagaaatagcaagttaaaataaggctagtccgtt | 340 |
| PBS 13 RT 29 | atcaacttgaaaaagtggcaccgagtcggtgcGACGAGCGCGGCGATATCATCATCCA | |
| AttB 46 Bacillus | TGGgtttttccagatccagttggtcctgtaaatatTGAGCTGCGAGAA | |
| _cytotoxicus | | |
| _NVH_391- | | |
| 98_Att_rc 32 bp | | |
| Bacillus_cereus | GCTGTCTCCGCCGCCCGCCAgttttagagctagaaatagcaagttaaaataaggctagtccg | 341 |
| AH187_Att | ttatcaacttgaaaaagtggcaccgagtcggtgcAGTCGCCATGatatggggaagtgaatcagta | |
| _rc_36 LMNB1 | caaccgccacagtacCGGGCGGCG | |
| PBS 9 RT | | |
| 10 AttB 36 | | |
| atgRNA | | |
| Bacillus_cereus | GCGTATTGCCTGGAGGATGGgttttagagctagaaatagcaagttaaaataaggctagtccg | 342 |
| AH187_Att | ttatcaacttgaaaaagtggcaccgagtcggtgcGAACCACGCGGCGAATGCCGGCGT | |
| rc_36 NOLC1 | CCGCCatatggggaagtgaatcagtacaaccgccacagtacTCCTCCAGGCAATACG | |
| PBS 18 RT | CG | |
| 29 AttB 36 | | |
| atgRNA | | |
| Bacillus_cereus | GAGAAGCGGCGTCCGGGGCTAgttttagagctagaaatagcaagttaaaataaggctagtc | 343 |
| AH187_Att | cgttatcaacttgaaaaagtggcaccgagtcggtgcTCTTTGTCCAGAGTCACAGCCATA | |
| rc_36 SUPT 16H | atatggggaagtgaatcagtacaaccgccacagtacCCCCGGACGCCGC | |
| PBS 13 | | |
| RT 24 AttB 36 | | |
| atgRNA | | |
| Bacillus_cereus | GGGCACGGGGCCATGTACAAgttttagagctagaaatagcaagttaaaataaggctagtccg | 344 |
| AH187_Att | ttatcaacttgaaaaagtggcaccgagtcggtgcGGCGTCGGCAGCCCGATCCCGTTGa | |
| _rc_36 SRRM2 | tatggggaagtgaatcagtacaaccgccacagtacTACATGGCCCCGT | |
| PBS 13 RT | | |
| 24 AttB 36 | | |
| atgRNA | | |
| Bacillus_cereus_ | GTGTCAGGTGGGGCGGGGCTAgttttagagctagaaatagcaagttaaaataaggctagtc | 345 |
| AH187_Att | cgttatcaacttgaaaaagtggcaccgagtcggtgcGCTGGCTCCTCCCCTGGCACCATA | |
| _rc_36 DEPDC4 | atatggggaagtgaatcagtacaaccgccacagtacCCCCGCCCCACCTGACAC | |
| PBS 18 | | |
| RT 24 AttB 36 | | |
| atgRNA | | |
| Bacillus_cereus | GAGTGGGTCAGACGAGCAGGAgttttagagctagaaatagcaagttaaaataaggctagtc | 346 |
| AH187_Att | cgttatcaacttgaaaaagtggcaccgagtcggtgcCGACTCCTCCCCCATGCAGCCCTC | |
| _rc_36 NES PBS | CATCatatggggaagtgaatcagtacaaccgccacagtacTGCTCGTCTGACC | |
| 13 RT 28 | | |
| AttB 36 atgRNA | | |
| B. cereus | GCTGTCTCCGCCGCCCGCCAgttttagagctagaaatagcaagttaaaataaggctagtccg | 347 |
| LMNB1_PBS 9 | ttatcaacttgaaaaagtggcaccgagtcggtgcCGGGGGTCGCAGTCGCCATGatatgggg | |
| RT 20 AttB 36 | aagtgaatcagtacaaccgccacagtacCGGGCGGCG | |
| atgRNA | | |
| B. cereus | GGGCACGGGGCCATGTACAAgttttagagctagaaatagcaagttaaaataaggctagtccg | 348 |
| LMNB1_PBS 13 | ttatcaacttgaaaaagtggcaccgagtcggtgcCGGGGGTCGCAGTCGCCATGatatggg | |
| RT 20 AttB 36 | gaagtgaatcagtacaaccgccacagtacCGGGCGGCGGAGA | |
| atgRNA | | |
| B. cereus | GGGCACGGGGCCATGTACAAgttttagagctagaaatagcaagttaaaataaggctagtccg | 349 |
| LMNB1_PBS 13 | ttatcaacttgaaaaagtggcaccgagtcggtgcGCGGCGGCACGGGGGTCGCAGTCG | |
| RT 29 AttB 36 | CCATGatatggggaagtgaatcagtacaaccgccacagtacCGGGCGGCGGAGA | |
| atgRNA | | |
| B. cereus | GCGTATTGCCTGGAGGATGGgttttagagctagaaatagcaagttaaaataaggctagtccg | 350 |
| NOLC1_PBS 13 | ttatcaacttgaaaaagtggcaccgagtcggtgcGAACCACGCGGCGAATGCCGGCGTC | |
| RT 29 AttB 36 | CGCCatatggggaagtgaatcagtacaaccgccacagtacTCCTCCAGGCAAT | |
| atgRNA | | |
| B. cereus | GGGCACGGGGCCATGTACAAgttttagagctagaaatagcaagttaaaataaggctagtccg | 351 |
| NOLC1_PBS 13 | ttatcaacttgaaaaagtggcaccgagtcggtgcGGCGAATGCCGGCGTCCGCCatatgg | |
| RT 20 AttB 36 | ggaagtgaatcagtacaaccgccacagtacTCCTCCAGGCAAT | |
| atgRNA | | |
| B. cereus | GGGCACGGGGCCATGTACAAgttttagagctagaaatagcaagttaaaataaggctagtccg | 352 |
| NOLC1_PBS 18 | ttatcaacttgaaaaagtggcaccgagtcggtgcGGCGAATGCCGGCGTCCGCCatatgg | |
| RT 20 AttB 36 | ggaagtgaatcagtacaaccgccacagtacTCCTCCAGGCAATACGCG | |
| atgRNA | | |
| B. cereus | GGGCACGGGGCCATGTACAAgttttagagctagaaatagcaagttaaaataaggctagtccg | 353 |
| SRRM2_PBS 9 | ttatcaacttgaaaaagtggcaccgagtcggtgcGGCGTCGGCAGCCCGATCCCGTTGa | |
| RT 24 AttB 36 | tatggggaagtgaatcagtacaaccgccacagtacTACATGGCC | |
| atgRNA | | |
| B. cereus | GGGCACGGGGCCATGTACAAgttttagagctagaaatagcaagttaaaataaggctagtccg | 354 |
| SRRM2_PBS 9 | ttatcaacttgaaaaagtggcaccgagtcggtgcGATCCCGTTGatatggggaagtgaatca | |
| RT 10 AttB 36 | gtacaaccgccacagtacTACATGGCC | |
| atgRNA | | |
| B. cereus | GGGCACGGGGCCATGTACAAgttttagagctagaaatagcaagttaaaataaggctagtccg | 355 |
| SRRM2_PBS 13 | ttatcaacttgaaaaagtggcaccgagtcggtgcGATCCCGTTGatatggggaagtgaatca | |
| RT 10 AttB 36 | gtacaaccgccacagtacTACATGGCCCCGT | |
| atgRNA | | |
| Screen validation | GCTATTCTCGCAGCTCACCAgttttagagctagaaatagcaagttaaaataaggctagtccgtt | 356 |
| guides | atcaacttgaaaaagtggcaccgagtcggtgcgcgcggcgatatcatcatccatggatgatcc | |
| ACTB_1_11_24 | tgacgacggagaccgccgtcgtcgacaagcctgagctgcgag | |
| 38 | | |
| Screen validation | GCTATTCTCGCAGCTCACCAgttttagagctagaaatagcaagttaaaataaggctagtccgtt | 357 |
| guides | atcaacttgaaaaagtggcaccgagtcggtgccgatatcatcatccatggoggatgatcctgac | |
| ACTB_1_16_18 | gacggagaccgccgtcgtcgacaagccggctgagctgcgagaatag | |
| 43 | | |
| Screen validation | GCTGTCTCCGCCGCCCGCCAgttttagagctagaaatagcaagttaaaataaggctagtccg | 358 |
| guides | ttatcaacttgaaaaagtggcaccgagtcggtgcgcggcacgggggtcgcagtcgccatgat | |
| LMNB1_1_8_26 | gatcctgacgacggagaccgccgtcgtcgacaagcccgggcggc | |
| 38 | | |
| Screen validation | GCGTATTGCCTGGAGGATGGgttttagagctagaaatagcaagttaaaataaggctagtccg | 359 |
| guides | ttatcaacttgaaaaagtggcaccgagtcggtgcaatgccggcgtccgcccggatgatcctg | |
| NOLC1_1_15_16 | acgacggagaccgccgtcgtcgacaagccggctcctccaggcaatac | |
| 43 | | |
| Screen validation | GCGTATTGCCTGGAGGATGGgttttagagctagaaatagcaagttaaaataaggctagtccg | 360 |
| guides | ttatcaacttgaaaaagtggcaccgagtcggtgcggcgtccgccatgatcctgacgacggag | |
| NOLC1_1_14_10 | accgccgtcgtcgacaagcctcctccaggcaata | |
| _38 | | |
| Screen validation | GGGAAATGCATCTTGCACAAgttttagagctagaaatagcaagttaaaataaggctagtccgtt | 361 |
| guides | atcaacttgaaaaagtggcaccgagtcggtgcagcccctccatgctctctagctgttgccatt | |
| SERPIN_13_32 | gggcttgtcgacgacggcggtctccgtcgtcaggatcattgcaagatgcatt | |
| 38 | | |
| Screen validation | GTGTCAGGTGGGGCGGGGCTAgttttagagctagaaatagcaagttaaaataaggctagtc | 362 |
| guides | cgttatcaacttgaaaaagtggcaccgagtcggtgctggcaccataatgatcctgacgacg | |
| DEPDC4_8_10_3 | gagaccgccgtcgtcgacaagccccccgccc | |
| 8 | | |
| SERPIN Nicking | GTGGGGACAGCCCCGTCTCTgttttagagctagaaatagcaagttaaaataaggctagtccg | 363 |
| guide −107 guide | ttatcaacttgaaaaagtggcaccgagtcggtgc | |
| SERPIN Nicking | GCTCTTGGGAAAAAAACCCTAgttttagagctagaaatagcaagttaaaataaggctagtcc | 364 |
| guide −91 guide | gttatcaacttgaaaaagtggcaccgagtcggtgc | |
| SERPIN Nicking | GTCTTGGGAAAAAAACCCTAAgttttagagctagaaatagcaagttaaaataaggctagtccg | 365 |
| guide −90 guide | ttatcaacttgaaaaagtggcaccgagtcggtgc | |
| SERPIN Nicking | GAAAAAAACCCTAAGGGCTGgttttagagctagaaatagcaagttaaaataaggctagtccgt | 366 |
| guide −84 guide | tatcaacttgaaaaagtggcaccgagtcggtgc | |
| SERPIN Nicking | GCTGAGGATCCTTGTGAGTGTgttttagagctagaaatagcaagttaaaataaggctagtcc | 367 |
| guide −67 guide | gttatcaacttgaaaaagtggcaccgagtcggtgc | |
| SERPIN Nicking | GTGAGGATCCTTGTGAGTGTTgttttagagctagaaatagcaagttaaaataaggctagtcc | 368 |
| guide −66 guide | gttatcaacttgaaaaagtggcaccgagtcggtgc | |
| SERPIN Nicking | GGATCCTTGTGAGTGTTGGGgttttagagctagaaatagcaagttaaaataaggctagtccgt | 369 |
| guide −63 guide | tatcaacttgaaaaagtggcaccgagtcggtgc | |
| SERPIN Nicking | GATCCTTGTGAGTGTTGGGTgttttagagctagaaatagcaagttaaaataaggctagtccgtt | 370 |
| guide −62 guide | atcaacttgaaaaagtggcaccgagtcggtgc | |
| SERPIN Nicking | GTTGGGTGGGAACAGCTCCCgttttagagctagaaatagcaagttaaaataaggctagtccg | 371 |
| guide −49 guide | ttatcaacttgaaaaagtggcaccgagtcggtgc | |
| SERPIN Nicking | GGGTGGGAACAGCTCCCAGGgttttagagctagaaatagcaagttaaaataaggctagtcc | 372 |
| guide −46 guide | gttatcaacttgaaaaagtggcaccgagtcggtgc | |
| SERPIN Nicking | GCTTCTGTGCAGCAGTTTCCCgttttagagctagaaatagcaagttaaaataaggctagtcc | 373 |
| guide +34 guide | gttatcaacttgaaaaagtggcaccgagtcggtgc | |
| SERPIN Nicking | GTTTCCCTGGCCACTAAATAGgttttagagctagaaatagcaagttaaaataaggctagtccg | 374 |
| guide +48 guide | ttatcaacttgaaaaagtggcaccgagtcggtgc | |
| SERPIN Nicking | GTTCCCTGGCCACTAAATAGTgttttagagctagaaatagcaagttaaaataaggctagtccg | 375 |
| guide +49 guide | ttatcaacttgaaaaagtggcaccgagtcggtgc | |
| SERPIN Nicking | GATTAGATAGAAGCCCTCCAgttttagagctagaaatagcaagttaaaataaggctagtccgtt | 376 |
| guide +71 guide | atcaacttgaaaaagtggcaccgagtcggtgc | |
| SERPIN Nickingv | GATTAGATAGAAGCCCTCCAAgttttagagctagaaatagcaagttaaaataaggctagtcc | 377 |
| guide +72 guide | gttatcaacttgaaaaagtggcaccgagtcggtgc | |

[0258] Additional attachment sites suitable for use with the Serine integrases described in International Patent Publication No. WO 2023/070031A2, such as SEQ ID NOs: 1-16 and 163-1162 and 3166-3175 of WO2023/070031, are also disclosed in WO2023/070031 (which PCT publication is hereby incorporated by reference in its entirety).

[0259] Further suitable attachment sites for integrase (such as the eLSR described herein) suitable for use with the invention described herein are described in WO2023/177424 (which PCT publication is hereby incorporated by reference in its entirety).

### 6.8. Integrases/Recombinases and Integration/Recombination Sites

[0260] In typical embodiments, the co-delivery system described herein contains an integrase (such as the eLSR described herein) and/or a recombinase. In some embodiments, the co-delivery system includes an integrase (such as the eLSR described herein) and/or a recombinase packaged in a LNP. In one embodiment, the co-delivery system includes a polynucleotide encoding an integrase (such as the eLSR described herein) and/or a recombinase. In some embodiments, the co-delivery system includes an integrase (such as the eLSR described herein) or a recombinase packaged in a vector (e.g., a viral vector). In some embodiments, the co-delivery system includes at least a first integrase (e.g., a first integrase and a second integrase) and/or at least a first recombinase (e.g., a first recombinase and a second recombinase).

[0261] In some embodiments, the integration enzyme (e.g., the integrase or recombinase) is selected from the group consisting of Dre, Vika, Bxb1, φpC31, RDF, φBT1, R1, R2, R3, R4, R5, TP901-1, A118, φFC1, φC1, MR11, TG1, φ370.1, Wβ, BL3, SPBc, K38, Peaches, Veracruz, Rebeuca, Theia, Benedict, KSSJEB, PattyP, Doom, Scowl, Lockley, Switzer, Bob3, Troube, Abrogate, Anglerfish, Sarfire, SkiPole, ConceptII, Museum, Severus, Airmid, Benedict, Hinder, ICleared, Sheen, Mundrea, BxZ2, cpRV, retrotransposases encoded by a Tcl/mariner family member including but not limited to retrotransposases encoded by LI, Tol2, Tel, Tc3, Himar 1 (isolated from the hom fly, Haematobia irritans), Mos1 (Mosaic element of Drosophila mauritiana), and Minos, and any mutants thereof. As can be used herein, Xu et al describes methods for evaluating integrase activity in E. coli and mammalian cells and confirmed at least R4, φC31, φBT1, Bxb1, SPBc, TP901-1 and WP integrases to be active on substrates integrated into the genome of HT1080 cells (Xu et al., 2013, Accuracy and efficiency define Bxb1 integrase as the best of fifteen candidate serine recombinases for the integration of DNA into the human genome. BMC Biotechnol. 2013 Oct. 20; 13:87. doi: 10.1186/1472-6750-13-87). Durrant describes new large serine recombinases (LSRs) divided into three classes distinguished from one another by efficiency and specificity, including landing pad LSRs which outperform wild-type Bxb1 in episomal and chromosomal integration efficiency, LSRs that achieve both efficient and site-specific integration without a landing pad, and multi-targeting LSRs with minimal site-specificity. Additionally, embodiments can include any serine recombinase such as BceINT, SSCINT, SACINT, and INT10 (see Ionnidi et al., 2021; Drag-and-drop genome insertion without DNA cleavage with CRISPR directed integrases. bioRxiv 2021.11.01.466786, doi.org/10.1101/2021.11.01.466786).

[0262] In some embodiments, the integration site can be selected from an attB site, an attP site, an attL site, an attR site, a lox71 site a Vox site, or a FRT site. In instances in this disclosure that refer to a Cre-lox system, the Cre-lox system is referred to either as a control for programmable gene insertion or as a tool for a recombinase-mediated event separate and distinct from insertion of the donor polynucleotide template (or exogenous nucleic acid) into the integrated recognition site.

[0263] It will be appreciated that desired activity of integrases, transposases and the like can depend on nuclear localization. In certain embodiments, prokaryotic enzymes are adapted to modulate nuclear localization. In certain embodiments, eukaryotic or vertebrate enzymes are adapted to modulate nuclear localization. In certain embodiments, the invention provides fusion or hybrid proteins. Such modulation can comprise addition or removal of one or more nuclear localization signal (NLS) and/or addition or removal of one or more nuclear export signal (NES). Xu et al compared derivatives of fourteen serine integrases that either possess or lack a nuclear localization signal (NLS) to conclude that certain integrases benefit from addition of an NLS whereas others are transported efficiently without addition, and a major determinant of activity in yeast and vertebrate cells is avoidance of toxicity. (Xu et al., 2016, Comparison and optimization of ten phage encoded serine integrases for genome engineering in Saccharomyces cerevisiae. BMC Biotechnol. 2016 Feb. 9; 16:13. doi: 10.1186/s12896-016-0241-5). Ramakrishnan et al. systematically studied the effect of different NES mutants developed from mariner-like elements (MLEs) on transposase localization and activity and concluded that nuclear export provides a means of controlling transposition activity and maintaining genome integrity. (Ramakrishnan et al. Nuclear export signal (NES) of transposases affects the transposition activity of mariner-like elements Ppmar1 and Ppmar2 of moso bamboo. Mob DNA. 2019 Aug. 19; 10:35. doi:10.1186/s13100-019-0179-y). The methods and constructs are used to modulate nuclear localization of system components of the invention.

[0264] In typical embodiments, the integrase used herein is selected from below (Table 10).

TABLE 10
Integrases

| | | | | protein | | | | | | | | | |
|---|---|---|---|---|---|---|---|---|---|---|---|---|---|
| | | | nucleo- | acc- | inter- | | | | | | | | |
| | SRA | bio | tide | ession | nal | | Alt- | | | | SEQ | | |
| Data- | acc- | project_ | acc- | or | protein | Proposed | ernative | organism/ | des- | | ID | | |
| base | ession | acc | ession | ORF ID | ID | names | names | source | cription | Sequence | NO: | Length | Group |
| ENA | SR | PRJ | NA | NA | N189929_ | SsuI | NA | human | stool | MEKNRAVLYLRLSKEDVD | 378 | 527 | INTc |
| | S12 | EB2 | | | 49_54 | NT | | gutmeta | sample | KVNKGDDSSSIKSQRLLLT | | | |
| | 052 | 627 | | | | | | genome | from | DFALERGFKIVGVYSDDDE | | | |
| | 98 | 7 | | | | | | | male in | SGLYDDRPDFERMMTDAK | | | |
| | | | | | | | | | USA | LDEFDIIIAKTQSRFSRNME | | | |
| | | | | | | | | | | HIEKYLHHDLPNLGIRFIGA | | | |
| | | | | | | | | | | VDGVDTESDENKKSRQIN | | | |
| | | | | | | | | | | GLVNEWYCEDLSKNIRSA | | | |
| | | | | | | | | | | FKAKMKDGQFLGSSCPYG | | | |
| | | | | | | | | | | YKKDPQNHNHLVVDDYAA | | | |
| | | | | | | | | | | KVVQKIFNLYLEGYGKAKI | | | |
| | | | | | | | | | | GSILSSEGILIPTLYKKDILK | | | |
| | | | | | | | | | | QNYHNSKALDTTQNWSY | | | |
| | | | | | | | | | | QTIHTILNNEVYLGHLIQNK | | | |
| | | | | | | | | | | VNTMSYKDKNKRILPKEK | | | |
| | | | | | | | | | | WIIVRNTHEPIITEEMFQDV | | | |
| | | | | | | | | | | QKLQKNRTRSVENIEPNGL | | | |
| | | | | | | | | | | FSGLIFCADCKHAMSRKYA | | | |
| | | | | | | | | | | RRGEKGFVGYVCKTYKTQ | | | |
| | | | | | | | | | | GKNFCESHSIDYDELEEAV | | | |
| | | | | | | | | | | LFSIKNEARSILQQEEIDEL | | | |
| | | | | | | | | | | RKVQAYDETKSYYEMQLE | | | |
| | | | | | | | | | | NIKSRMEKIEKYKKKTYDN | | | |
| | | | | | | | | | | YMDDLISRDDYKKYVTEYD | | | |
| | | | | | | | | | | KEIGGLKQQQELINSKTDL | | | |
| | | | | | | | | | | EKEISTQYDEWVEAFINYV | | | |
| | | | | | | | | | | DIDKLTREIVIELIEKIEVNK | | | |
| | | | | | | | | | | DGSINIYYKFKNPYIS | | | |
| ENA | ERS | PRJ | NA | NA | N190156_ | SssI | NA | human | stool | MNTVIYARYSAGPRQTDQ | 379 | 510 | INTd |
| | 396 | EB2 | | | 234_12 | NT | | gut | sample | SIDGQLRVCTEFCKQRGLT | | | |
| | 461 | 628 | | | | | | metage | from | VVDTYCDRHISGRTDERP | | | |
| | | 0 | | | | | | nome | Spain | EFQRLIADAKAHKFEAVVV | | | |
| | | | | | | | | | | YKTDRFARNKYDSAIYKRE | | | |
| | | | | | | | | | | LRRNGIQIFYAAEAIPEGPE | | | |
| | | | | | | | | | | GIILESLMEGLAEYYSAELA | | | |
| | | | | | | | | | | QKIKRGLNESALKCQSLGS | | | |
| | | | | | | | | | | GRPLGYTVDEQKHFQIDP | | | |
| | | | | | | | | | | ESSQAVKTIFEMYIKGESN | | | |
| | | | | | | | | | | AAICDYLNARGLRTSQGNL | | | |
| | | | | | | | | | | FNKNSINRIIKNRKYIGEYR | | | |
| | | | | | | | | | | YNDIVVEGGMPAIISKETFC | | | |
| | | | | | | | | | | MAQAEMERRRTHRAPVS | | | |
| | | | | | | | | | | PKAEYLLAGKLFCGHCKG | | | |
| | | | | | | | | | | PMQGVSGTGKSGNKWYY | | | |
| | | | | | | | | | | YYCANTRGKERTCDKKQV | | | |
| | | | | | | | | | | SRDRLEKAVVDFTVRYILQ | | | |
| | | | | | | | | | | ENVLEELSKKVYAAQERQ | | | |
| | | | | | | | | | | NNTASEIAFYEKKLAENKK | | | |
| | | | | | | | | | | AIANILRAIESGAMTQALPA | | | |
| | | | | | | | | | | RLQELENEQTVIQGELSYL | | | |
| | | | | | | | | | | KGARLAFTEDQILFALLQH | | | |
| | | | | | | | | | | LDPRPGESERDYHRRIITD | | | |
| | | | | | | | | | | FVSEVYLYDDRMLIYFNISS | | | |
| | | | | | | | | | | ADGKLKHADLSAIESGVFD | | | |
| | | | | | | | | | | AGLISSSSRASSFSTRCALI | | | |
| ENA | ER | PRJ | NA | NA | N191352_ | SscI | NA | human | stool | MNEKNLEIGAAYIRVSTDD | 380 | 482 | INTd |
| | S10 | EB2 | | | 143_72 | NT | | gutmeta | sample | QTELSPDAQLRVILEAAKK | | | |
| | 158 | 683 | | | | | | genome | from | DGIIIPQEFVFMEDRGRSG | | | |
| | 37 | 2 | | | | | | | China | RRADNRPEFQRMISTARQ | | | |
| | | | | | | | | | | NPSPFRYLYLWKFSRFAR | | | |
| | | | | | | | | | | NQEESAFYKGILRKKCGVT | | | |
| | | | | | | | | | | IKSVSEPIMEGMFGRLVEM | | | |
| | | | | | | | | | | IIEWSDEFYSVNLSGEVLR | | | |
| | | | | | | | | | | GMTQKALEHGYQLTPCLG | | | |
| | | | | | | | | | | YDAVGHGRPYVINEEQYQI | | | |
| | | | | | | | | | | VEFIHRSFFDGKDMTWIAR | | | |
| | | | | | | | | | | EANRRGYHTRRGNPFDTR | | | |
| | | | | | | | | | | AVRIILTNSFYVGLVKWND | | | |
| | | | | | | | | | | VTFQGTHECRESVTSVFS | | | |
| | | | | | | | | | | ANQERLNRIHRPRGRRQA | | | |
| | | | | | | | | | | SSCKHWLSGLLKCSICGA | | | |
| | | | | | | | | | | SLGYNQTKDLTKRGHAFQ | | | |
| | | | | | | | | | | CWKYTKGIHPGSCSVSSL | | | |
| | | | | | | | | | | KAEAAVLESLQMILETGEV | | | |
| | | | | | | | | | | EYTYEQREKHLDDNKLTLI | | | |
| | | | | | | | | | | QKSLERLDTKELRIREAYE | | | |
| | | | | | | | | | | SGIDTLDEFKTNKARLQRE | | | |
| | | | | | | | | | | RDQLMEELEELHSQEEPE | | | |
| | | | | | | | | | | DVPGKEILIERIQNVYDLLQ | | | |
| | | | | | | | | | | SPDVDNDDKGNAVRSIIKK | | | |
| | | | | | | | | | | IVYIKESKTFCFYYYV | | | |
| ENA | ER | PRJ | NA | NA | N191533_ | Ssc2 | NA | human | stool | MERTIKVIQPGTVKIPTKKR | 381 | 406 | INTc |
| | S12 | EB2 | | | 224_76 | INT | | gutmeta | sample | VAAYARVSSGKDAMLHSL | | | |
| | 896 | 692 | | | | | | genome | from | SAQVSYYSNMIQQKNEWS | | | |
| | 77 | 4 | | | | | | | China | YVGIYADEAITGTKDRRVE | | | |
| | | | | | | | | | | FNRLIQDCTDGKIDMIITKSI | | | |
| | | | | | | | | | | SRFARNTLTMLEVVRKLKN | | | |
| | | | | | | | | | | INVDVYFEKENIHSISGDGE | | | |
| | | | | | | | | | | LMLTILASFAQEESRSVSE | | | |
| | | | | | | | | | | NCKWRIRKGFEQGELINLR | | | |
| | | | | | | | | | | FLYGYRINKGKIEIYEKEAEI | | | |
| | | | | | | | | | | VRMIFDDYLNGEGCTRIGN | | | |
| | | | | | | | | | | KLRKMKVNKLRGGMWNS | | | |
| | | | | | | | | | | ERVVDIIKNEKYTGNALLQ | | | |
| | | | | | | | | | | KKYVKDHLSKKLVRNKGIL | | | |
| | | | | | | | | | | TQYYAEGTHPAIIDIKTFEIA | | | |
| | | | | | | | | | | QKIMEANRTKFQGKCGSN | | | |
| | | | | | | | | | | RYLFTSKIECGICGKNYRH | | | |
| | | | | | | | | | | KDREGKSTWVCANHLKYG | | | |
| | | | | | | | | | | NSRCIAKPLNEEKLKKLINE | | | |
| | | | | | | | | | | ALELKYFDEEIFIRNIKRIKV | | | |
| | | | | | | | | | | TGNQTIEFILKDGKVIEEGM | | | |
| | | | | | | | | | | I | | | |
| ENA | ERS | PRJ | NA | NA | N203911_ | SsdI | NA | human | stool | MKKIKIDRAIQERPATRKQ | 382 | 401 | INTc |
| | 265 | EB2 | | | 45186_6 | NT | | gut | sample | TRNEKIRQSLTEHVDVQVI | | | |
| | 582 | 824 | | | | | | metage | from | PAITDREGYEKPKLRVCAY | | | |
| | 7 | 5 | | | | | | nome | Denmark | CRVSTDMDTQALSYELQV | | | |
| | | | | | | | | | | QNYTDYIRGNDEWRFAGI | | | |
| | | | | | | | | | | YADRGISGTSLKHRDEFN | | | |
| | | | | | | | | | | RMIEDCKAGKIDLIITKAVT | | | |
| | | | | | | | | | | RFARNVLDCISTIRMLKQL | | | |
| | | | | | | | | | | EHPVAVYFETERINTLDTT | | | |
| | | | | | | | | | | SETYLGLISLFAQGESESK | | | |
| | | | | | | | | | | SESLKWSYIRRWKRGTGI | | | |
| | | | | | | | | | | YPAWSLLGYEMGEDGKW | | | |
| | | | | | | | | | | QIVEAEAELVRIIYDMYLNG | | | |
| | | | | | | | | | | YSSPQIAEILTRSGVPTATN | | | |
| | | | | | | | | | | QTVWSSGGVLGILRNEKY | | | |
| | | | | | | | | | | CGNVLCQKTMTVDVFSHK | | | |
| | | | | | | | | | | AIKNTGQKTQYFIEGHHDP | | | |
| | | | | | | | | | | IILRSDWDRVQQMIDEKYY | | | |
| | | | | | | | | | | RKRRGRRTKPRIVLKGCLA | | | |
| | | | | | | | | | | GFTQIDLDWDEDDIARIFY | | | |
| | | | | | | | | | | STTPAAEVATPAMADHIEII | | | |
| | | | | | | | | | | KVKGEN | | | |
| ENA | SRS | PRJ | NA | NA | N208621_ | SmcI | NA | human | sample | MKTAAAYIRVSTDDQVEYS | 383 | 476 | INTd |
| | 294 | EB3 | | | 9_15 | NT | | gut | from | PDSQIKLIRDYAKRNDYILP | | | |
| | 942 | 004 | | | | | | metage | 72- | DEFIFRDDGISGKSAKHRP | | | |
| | | | | | | | | nome | year-old | EFTKMIALAKSPEHPFDAIL | | | |
| | | 16 | | | | | | | male | VWKFSRFARNQEESIVFK | | | |
| | | | | | | | | | from | NILRKIGVEVRSVSEPISED | | | |
| | | | | | | | | | China | PFGSLVERIIEWTDEYYIIN | | | |
| | | | | | | | | | | LSGEVKRGMLEKISRGQP | | | |
| | | | | | | | | | | WPPPVGYKMENGQYIPD | | | |
| | | | | | | | | | | ENAHFIKEIFEAYAAGEGA | | | |
| | | | | | | | | | | RHIAQRLAAQGCLTKRGN | | | |
| | | | | | | | | | | PIDNRFVDYVLHNPVYIGK | | | |
| | | | | | | | | | | LRWSVNSHAASSRHYDSA | | | |
| | | | | | | | | | | DIIVFDGTHEPLISSELWES | | | |
| | | | | | | | | | | VQKRLHEVKTLYPKYQRR | | | |
| | | | | | | | | | | EQPVSFMLKGLVRCSSCG | | | |
| | | | | | | | | | | STLCYCRTSEPSLQCHSY | | | |
| | | | | | | | | | | ARGSCRQSHSINIATANEA | | | |
| | | | | | | | | | | VIKGLQLAVDKLDFAIAPAK | | | |
| | | | | | | | | | | PHYSADAPGTNKLLAAEY | | | |
| | | | | | | | | | | KKMERIKAAYANGTDTLEE | | | |
| | | | | | | | | | | YAANKKKISAEIARLEAELQ | | | |
| | | | | | | | | | | QESNVKPINKKAFAKRVSE | | | |
| | | | | | | | | | | IIKYISDPHNSEAAKNQALR | | | |
| | | | | | | | | | | TVISYIIFDRAATTFNIIFHF | | | |
| Meta | NA | NA | NA | NA | N675015_ | UhmI | NA | urban | NA | MKIAIYARKSKYSPTGESV | 384 | 550 | INTd |
| SUB | | | | | 95_5 | NT | | human | | ENQIQLCKEYLQAKYKSET | | | |
| | | | | | | | | micro- | | LEIDEYKDEGYSGGNTNR | | | |
| | | | | | | | | biome | | PDFKKLIAQIEDYDMLICYR | | | |
| | | | | | | | | | | LDRISRNVADFSSTLTLLQ | | | |
| | | | | | | | | | | NNKCDFVSIKEQFDTTSPM | | | |
| | | | | | | | | | | GRAMIYISSVFAQLERETIA | | | |
| | | | | | | | | | | ERIRDNMMELAKMGRWL | | | |
| | | | | | | | | | | GGTIPMGFDSEPITFIDEN | | | |
| | | | | | | | | | | MKERSMTKLIPNVEELKVI | | | |
| | | | | | | | | | | ELIYEKYLQLGSMGKVVTY | | | |
| | | | | | | | | | | LLQNNIKTKKGKDFTLGSIK | | | |
| | | | | | | | | | | VILTNPIYVKANQEVVNHLK | | | |
| | | | | | | | | | | TQGITICGDVDGKKALLTY | | | |
| | | | | | | | | | | NKTTGISNDVGTKTIVKDK | | | |
| | | | | | | | | | | SEWIAAVANHKGIIPADKW | | | |
| | | | | | | | | | | LQAQNIKDKNKDSFPALGR | | | |
| | | | | | | | | | | SNTTIASRVLRCDKCESTM | | | |
| | | | | | | | | | | GVTHGHINPVTGKKHYYY | | | |
| | | | | | | | | | | NCTLKKRSKGVRCDNKPA | | | |
| | | | | | | | | | | KAAEVDEAILITLENMFKAK | | | |
| | | | | | | | | | | SSIIDNLKAKNKARRIEMIS | | | |
| | | | | | | | | | | SNRVDVINKIIEDKTKQIDN | | | |
| | | | | | | | | | | LVNKLSLDDDLTDILFKKIK | | | |
| | | | | | | | | | | GLKAEIKELEDELLTLTSDN | | | |
| | | | | | | | | | | IKLNEDEVVLDFTEKLLEKC | | | |
| | | | | | | | | | | SIIRTLDILEQQQIVDALIPL | | | |
| | | | | | | | | | | VTWNGDTEVLNIYPLGSPE | | | |
| | | | | | | | | | | LELKEAESKKK | | | |
| Sega | NA | PRJ | NA | NA | N684346_ | SacI | NA | human | stool | MKEKVSERKTGAIYIRVST | 385 | 493 | INTd |
| ta- | | NA4 | | | 90_69 | NT | | gut | sample | DKQEELSPDAQLRLLLDYA | | | |
| Pas | | 224 | | | | | | metage | from | KKDSIDVPKEYIFQDNGIS | | | |
| olli | | 34 | | | | | | nome | adult in | GRKANKRPAFQNMIALAK | | | |
| | | | | | | | | | China | SKEHPIDTIIVWKFSRFARN | | | |
| | | | | | | | | | | QEESIVYKSLLKKNNVDVV | | | |
| | | | | | | | | | | SVSEPLIDGPFGSLIERIIE | | | |
| | | | | | | | | | | WMDEYYSIRLSGEVMRG | | | |
| | | | | | | | | | | MTQNAMRGHYQSDAPIGY | | | |
| | | | | | | | | | | TSPGDKKPPVINPDTVQIP | | | |
| | | | | | | | | | | LMIKDMFLSGSTQLQIARK | | | |
| | | | | | | | | | | LNDSGYRTKRGNLWDAR | | | |
| | | | | | | | | | | GVRYVLENPFYIGKSRWN | | | |
| | | | | | | | | | | YTERGRRLKPADEVIYADG | | | |
| | | | | | | | | | | NWEALWDEDTFKEIQKRL | | | |
| | | | | | | | | | | ALNMRKSKSRDISAAKHW | | | |
| | | | | | | | | | | LSGLLICSSCGGTLAFGGA | | | |
| | | | | | | | | | | HNMRGFQCWKYSKGFCS | | | |
| | | | | | | | | | | ESHYISTGPIEKMVLEYLEA | | | |
| | | | | | | | | | | VMHSPALSYTVISSSSVDA | | | |
| | | | | | | | | | | SSKLSDLERQLQKIDAKEK | | | |
| | | | | | | | | | | RIKAAYLNEIDTLEEYKANK | | | |
| | | | | | | | | | | TALEEERRTVEKEIEELTLS | | | |
| | | | | | | | | | | DVKYSKEDLDKKMKQNIS | | | |
| | | | | | | | | | | DLLRVLRDESADYIQKGN | | | |
| | | | | | | | | | | MMRNVVDHIVFNRKNTSL | | | |
| | | | | | | | | | | DVFLKLVV | | | |
| Sega | ER | PRJ | NA | NA | N687611_ | RsaI | NA | human | rectal | MKITKKQPLRPRGRSEDK | 386 | 404 | INTc |
| ta- | R | EB1 | | | 90_68 | NT | | gut | swab | RQSTKNVIRDAYINGPQKE | | | |
| Pas | 113 | 153 | | | | | | metage | from | VQIIPAKRDMEAETEKKKL | | | |
| oLi | 686 | 2 | | | | | | nome | adult in | RVCAYCRVSTDEDTQASS | | | |
| | 4 | | | | | | | | Isreal | YELQVQNYTRMIRENPEW | | | |
| | | | | | | | | | | EFAGIFADEGISGTSVLHR | | | |
| | | | | | | | | | | EHFLEMIEKCKAGEIDLIITK | | | |
| | | | | | | | | | | QVSRFARNVLDSLNYIFML | | | |
| | | | | | | | | | | RKLDPPVGVYFETEKLNTL | | | |
| | | | | | | | | | | DKSSDMVITVLSLVAQSES | | | |
| | | | | | | | | | | EQKSNSLKWSFKRRRAQ | | | |
| | | | | | | | | | | GLGIYPSWALLGYRLDDEK | | | |
| | | | | | | | | | | NWEIVEDEADIVRTIYSLYL | | | |
| | | | | | | | | | | DGYSSTQIAELLTKSGIPTV | | | |
| | | | | | | | | | | KGLSVWSSGSVLGILKNEK | | | |
| | | | | | | | | | | FCGDALCQKTVTIDFFTHK | | | |
| | | | | | | | | | | SVKNNGIEPQYFVEGHHIP | | | |
| | | | | | | | | | | IIEKNDWLLAQQIRKERRY | | | |
| | | | | | | | | | | RKRRSTHRKPRIVVKGALS | | | |
| | | | | | | | | | | GFMIVDTSWDEEYVDSLLI | | | |
| | | | | | | | | | | SATQKPEPAPVIAEEDENF | | | |
| | | | | | | | | | | IVIEKE | | | |
| Seg | ER | PRJ | NA | NA | N687663_ | Rsa2 | NA | human | rectal | MADIQPVKNGALYIRVSTH | 387 | 498 | INTd |
| ata- | R11 | EB1 | | | 53_29 | INT | | gut | swab | LQEELSPDAQKRLLMEYA | | | |
| Pas | 367 | 153 | | | | | | metage | from | EAHNIIVLKEHIYIDSGISGR | | | |
| o lli | 37 | 2 | | | | | | nome | adult in | SARQRPQFNNMIAEAKSK | | | |
| | | | | | | | | | Israel | EHPFDVILVWKYSRFARN | | | |
| | | | | | | | | | | QEESIVYKSMLKRENVDVI | | | |
| | | | | | | | | | | SVSEPISDDPFGSLIERIIE | | | |
| | | | | | | | | | | WMDEYYSIRLSGEVSRGM | | | |
| | | | | | | | | | | AENAMRGNYQARPPLGY | | | |
| | | | | | | | | | | RIPGYRQTPVIVPEEAELIQ | | | |
| | | | | | | | | | | LIFDLYTEKKMGIFEIVRYL | | | |
| | | | | | | | | | | NEHGYQTGHKKPFQRRSV | | | |
| | | | | | | | | | | TYILKNPTYIGKTIWNQHD | | | |
| | | | | | | | | | | QDHKLRDKSEWIIADGKHE | | | |
| | | | | | | | | | | PIISKEQFDKAQKRIESTYK | | | |
| | | | | | | | | | | PAYRKPTSVCHHWLSSLL | | | |
| | | | | | | | | | | KCSSCGRTLVVKRTASKK | | | |
| | | | | | | | | | | KDRMYVNFQCYGYQKGIC | | | |
| | | | | | | | | | | NTNQSISAIKLEPVIMHALE | | | |
| | | | | | | | | | | DAMTSGKIHFDVLNPTTLD | | | |
| | | | | | | | | | | SSQKQQFLTRLNEIEKKEE | | | |
| | | | | | | | | | | RIKRAYRDGIDTLEEYKEN | | | |
| | | | | | | | | | | KSIIQTEKEMLLKKIEHIEEP | | | |
| | | | | | | | | | | ALSPEEAKPIMMDRIKNVY | | | |
| | | | | | | | | | | EIITNPDIGMEEKNKAARSII | | | |
| | | | | | | | | | | EKIVFDRATGSVNIFFYLAH | | | |
| | | | | | | | | | | CP | | | |
| NCBI | NA | NA | NC_ | NP_ | NA | Bxb | Bxb1 | Myco- | NA | MRALVVIRLSRVTDATTSP | 388 | 501 | INTa |
| | | | 0026 | 07530 | | NT | inte- | bacterium | | ERQLESCQQLCAQRGWD | | | |
| | | | 56.1 | 2.1 | | | grase | phage | | WGVAEDLDVSGAVDPFD | | | |
| | | | | | | | | Bxb1 | | RKRRPNLARWLAFEEQPF | | | |
| | | | | | | | | | | DVIVAYRVDRLTRSIRHLQ | | | |
| | | | | | | | | | | QLVHWAEDHKKLVVSATE | | | |
| | | | | | | | | | | AHFDTTTPFAAVVIALMGT | | | |
| | | | | | | | | | | VAQMELEAIKERNRSAAHF | | | |
| | | | | | | | | | | NIRAGKYRGSLPPWGYLP | | | |
| | | | | | | | | | | TRVDGEWRLVPDPVQRE | | | |
| | | | | | | | | | | RILEVYHRVVDNHEPLHLV | | | |
| | | | | | | | | | | AHDLNRRGVLSPKDYFAQ | | | |
| | | | | | | | | | | LQGREPQGREWSATALKR | | | |
| | | | | | | | | | | SMISEAMLGYATLNGKTVR | | | |
| | | | | | | | | | | DDDGAPLVRAEPILTREQL | | | |
| | | | | | | | | | | EALRAELVKTSRAKPAVST | | | |
| | | | | | | | | | | PSLLLRVLFCAVCGEPAYK | | | |
| | | | | | | | | | | FAGGGRKHPRYRCRSMG | | | |
| | | | | | | | | | | FPKHCGNGTVAMAEWDA | | | |
| | | | | | | | | | | FCEEQVLDLLGDAERLEKV | | | |
| | | | | | | | | | | WVAGSDSAVELAEVNAEL | | | |
| | | | | | | | | | | VDLTSLIGSPAYRAGSPQR | | | |
| | | | | | | | | | | EALDARIAALAARQEELEG | | | |
| | | | | | | | | | | LEARPSGWEWRETGQRF | | | |
| | | | | | | | | | | GDWWREQDTAAKNTWLR | | | |
| | | | | | | | | | | SMNVRLTFDVRGGLTRTID | | | |
| | | | | | | | | | | FGDLQEYEQHLRLGSVVE | | | |
| | | | | | | | | | | RL HTGMS* | | | |
| NCBI | NA | NA | NC_ | NP_ | NA | Tp9I | TP901- | Lacto- | NA | MTKKVAIYTRVSTTNQAEE | 389 | 486 | INTd |
| | | | 0027 | 11266 | | NT | 1inte- | coccus | | GFSIDEQIDRLTKYAEAMG | | | |
| | | | | | | | grase | phage | | WQVSDTYTDAGFSGAKLE | | | |
| | | | 47.1 | 4.1 | | | | TP901- | | RPAMQRLINDIENKAFDTV | | | |
| | | | | | | | | 1 | | LVYKLDRLSRSVRDTLYLV | | | |
| | | | | | | | | | | KDVFTKNKIDFISLNESIDT | | | |
| | | | | | | | | | | SSAMGSLFLTILSAINEFER | | | |
| | | | | | | | | | | ENIKERMTMGKLGRAKSG | | | |
| | | | | | | | | | | KSMMWTKTAFGYYHNRK | | | |
| | | | | | | | | | | TGILEIVPLQATIVEQIFTDY | | | |
| | | | | | | | | | | LSGISLTKLRDKLNESGHIG | | | |
| | | | | | | | | | | KDIPWSYRTLRQTLDNPVY | | | |
| | | | | | | | | | | CGYIKFKDSLFEGMHKPIIP | | | |
| | | | | | | | | | | YETYLKVQKELEERQQQT | | | |
| | | | | | | | | | | YERNNNPRPFQAKYMLSG | | | |
| | | | | | | | | | | MARCGYCGAPLKIVLGHK | | | |
| | | | | | | | | | | RKDGSRTMKYHCANRFPR | | | |
| | | | | | | | | | | KTKGITVYNDNKKCDSGTY | | | |
| | | | | | | | | | | DLSNLENTVIDNLIGFQEN | | | |
| | | | | | | | | | | NDSLLKIINGNNQPILDTSS | | | |
| | | | | | | | | | | FKKQISQIDKKIQKNSDLYL | | | |
| | | | | | | | | | | NDFITMDELKDRTDSLQAE | | | |
| | | | | | | | | | | KKLLKAKISENKENDSTDV | | | |
| | | | | | | | | | | FELVKTQLGSIPINELSYDN | | | |
| | | | | | | | | | | KKKIVNNLVSKVDVTADNV | | | |
| | | | | | | | | | | DIIFKFQLA* | | | |
| NCBI | NA | NA | NC_ | NP- | NA | Bt1I | PhiBT | Strepto- | NA | MSPFIAPDVPEHLLDTVRV | 390 | 595 | INTa |
| | | | 004664. | 81374 | | NT | inte- | myces | | FLYARQSKGRSDGSDVST | | | |
| | | | 2 | 4.2 | | | grase | virus | | EAQLAAGRALVASRNAQG | | | |
| | | | | | | | | phiBT1 | | GARWVVAGEFVDVGRSG | | | |
| | | | | | | | | | | WDPNVTRADFERMMGEV | | | |
| | | | | | | | | | | RAGEGDVVVVNELSRLTR | | | |
| | | | | | | | | | | KGAHDALEIDNELKKHGVR | | | |
| | | | | | | | | | | FMSVLEPFLDTSTPIGVAIF | | | |
| | | | | | | | | | | ALIAALAKQDSDLKAERLK | | | |
| | | | | | | | | | | GAKDEIAALGGVHSSSAPF | | | |
| | | | | | | | | | | GMRAVRKKVDNLVISVLEP | | | |
| | | | | | | | | | | DEDNPDHVELVERMAKMS | | | |
| | | | | | | | | | | FEGVSDNAIATTFEKEKIPS | | | |
| | | | | | | | | | | PGMAERRATEKRLASIKAR | | | |
| | | | | | | | | | | RLNGAEKPIMWRAQTVRW | | | |
| | | | | | | | | | | ILNHPAIGGFAFERVKHGK | | | |
| | | | | | | | | | | AHINVIRRDPGGKPLTPHT | | | |
| | | | | | | | | | | GILSGSKWLELQEKRSGK | | | |
| | | | | | | | | | | NLSDRKPGAEVEPTLLSG | | | |
| | | | | | | | | | | WRFLGCRICGGSMGQSQ | | | |
| | | | | | | | | | | GGRKRNGDLAEGNYMCA | | | |
| | | | | | | | | | | NPKGHGGLSVKRSELDEF | | | |
| | | | | | | | | | | VASKVWARLRTADMEDEH | | | |
| | | | | | | | | | | DQAWIAAAAERFALQHDL | | | |
| | | | | | | | | | | AGVADERREQQAHLDNVR | | | |
| | | | | | | | | | | RSIKDLQADRKAGLYVGR | | | |
| | | | | | | | | | | EELETWRSTVLQYRSYEA | | | |
| | | | | | | | | | | ECTTRLAELDEKMNGSTR | | | |
| | | | | | | | | | | VPSEWFSGEDPTAEGGIW | | | |
| | | | | | | | | | | ASWDVYERREFLSFFLDS | | | |
| | | | | | | | | | | VMVDRGRHPETKKYIPLK | | | |
| | | | | | | | | | | DRVTLKWAELLKEEDEAS | | | |
| | | | | | | | | | | EATERELAAL* | | | |
| NCBI | NA | NA | NC_ | WP_ | NA | BceI | NA | Bacillus | NA | MYPYDVPDYAGSYRPESL | 391 | 529 | INTc |
| | | | 0116 | 0002 | | NT | | cereus | | DVCIYLRKSRKDVEEERRA | | | |
| | | | | | | | | AH187 | | IEEGSSYNALERHRKRLFA | | | |
| | | | 58.1 | 8620 | | | | | | IAKAENHNIIDIFEEVASGE | | | |
| | | | | 6.1 | | | | | | SIQERPQMQQLLRKLEGN | | | |
| | | | | | | | | | | EIDGVLVIDLDRLGRGDML | | | |
| | | | | | | | | | | DAGMIDRAFRYSSTKIITPT | | | |
| | | | | | | | | | | DVYDPDDESWELVFGIKSL | | | |
| | | | | | | | | | | ISRQELKSITKRLQNGRIDS | | | |
| | | | | | | | | | | VKEGKHIGKKPPYGYLKDE | | | |
| | | | | | | | | | | NLRLYPDPEKAWIVKKIFEL | | | |
| | | | | | | | | | | MCDGKGRQMIAAELDRLG | | | |
| | | | | | | | | | | IDPPVTKRGAWDSSTITSII | | | |
| | | | | | | | | | | KNEVYTGVIVWGKFKHKK | | | |
| | | | | | | | | | | RNGKYTRHKNPQEKWIMY | | | |
| | | | | | | | | | | ENAHEPIISKELFDAANEA | | | |
| | | | | | | | | | | HSSRHKPAVITSKKLTNPL | | | |
| | | | | | | | | | | AGILKCKLCGYTMLIQTRK | | | |
| | | | | | | | | | | DRPHNYLRCNNPACKGKQ | | | |
| | | | | | | | | | | KQSVFNLVEEKLLYSLQQI | | | |
| | | | | | | | | | | VDEYQAQKVEEVEIDDSKL | | | |
| | | | | | | | | | | ISFKEKAIISKEKELKELQA | | | |
| | | | | | | | | | | QKGNLHDLLEQGIYTVEIFL | | | |
| | | | | | | | | | | ERQKNLVERITSIENDIEVL | | | |
| | | | | | | | | | | QKEIETEQIKEHNKTEFIPA | | | |
| | | | | | | | | | | LKTVIESYHKTTNIELKNQL | | | |
| | | | | | | | | | | LKTILSTVTYYRHPDWKTN | | | |
| | | | | | | | | | | EFEIQVYFKIS* | | | |
| NCBI | NA | NA | NC_ | WP_ | NA | BcyI | NA | Bacillus | NA | MYPYDVPDYAGSAVGIYIR | 392 | 487 | INTd |
| | | | 00 | 0120 | | NT | | cyto- | | VSTQEQASEGHSIESQKK | | | |
| | | | 9674. | 9542 | | | | toxicus | | KLASYCEIQGWDDYRFYIE | | | |
| | | | 1 | 9.1 | | | | NVH391- | | EGISGKNTNRPKLKLLMEH | | | |
| | | | | | | | | 98 | | IEKGKINILLVYRLDRLTRS | | | |
| | | | | | | | | | | VIDLHKLLNFLQEHGCAFK | | | |
| | | | | | | | | | | SATETYDTTTANGRMSMG | | | |
| | | | | | | | | | | IVSLLAQWETENMSERIKL | | | |
| | | | | | | | | | | NLEHKVLVEGERVGAIPYG | | | |
| | | | | | | | | | | FDLSDDEKLVKNEKSAILL | | | |
| | | | | | | | | | | DMVERVENGWSVNRIVNY | | | |
| | | | | | | | | | | LNLTNNDRNWSPNGVLRL | | | |
| | | | | | | | | | | LRNPALYGATRWNDKIAE | | | |
| | | | | | | | | | | NTHEGIISKERFNRLQQILA | | | |
| | | | | | | | | | | DRSIHHRRDVKGTYIFQGV | | | |
| | | | | | | | | | | LRCPVCDQTLSVNRFIKKR | | | |
| | | | | | | | | | | KDGTEYCGVLYRCQPCIK | | | |
| | | | | | | | | | | QNKYNLAIGEARFLKALNE | | | |
| | | | | | | | | | | YMSTVEFQTVEDEVIPKKS | | | |
| | | | | | | | | | | EREMLESQLQQIARKREK | | | |
| | | | | | | | | | | YQKAWASDLMSDDEFEKL | | | |
| | | | | | | | | | | MVETRETYDECKQKLESC | | | |
| | | | | | | | | | | EDPIKIDETYLKEIVYMFHQ | | | |
| | | | | | | | | | | TFNDLESEKQKEFISKFIRT | | | |
| | | | | | | | | | | IRYTVKEQQPIRPDKSKTG | | | |
| | | | | | | | | | | KGKQKVIITEVE FYQS* | | | |
| NCBI | NA | NA | NC_ | WP_0145 | NA | SluI | NA | Staphy- | NA | MYPYDVPDYAGSKVAIYT | 393 | 473 | INTd |
| | | | 0173 | 3323 | | NT | | lococcus | | RVSSAEQANEGYSIHEQK | | | |
| | | | 53.1 | 8.1 | | | | lug- | | KKLISYCEIHDWNEYKVFT | | | |
| | | | | | | | | dunensis | | DAGISGGSMKRPALQKLM | | | |
| | | | | | | | | N920143 | | KHLSSFDLVLVYKLDRLTR | | | |
| | | | | | | | | | | NVRDLLDMLEEFEQYNVS | | | |
| | | | | | | | | | | FKSATEVFDTTSAIGKLFIT | | | |
| | | | | | | | | | | MVGAMAEWERETIRERSL | | | |
| | | | | | | | | | | FGSRAAVREGNYIREAPF | | | |
| | | | | | | | | | | CYDNIEGKLHPNEYAKVID | | | |
| | | | | | | | | | | LIVSMFKKGISANEIARRLN | | | |
| | | | | | | | | | | SSKVHVPNKKSWNRNSLI | | | |
| | | | | | | | | | | RLMRSPVLRGHTKYGDML | | | |
| | | | | | | | | | | IENTHEPVLSEHDYNAINN | | | |
| | | | | | | | | | | AISSKTHKSKVKHHAIFRG | | | |
| | | | | | | | | | | ALVCPQCNRRLHLYAGTV | | | |
| | | | | | | | | | | KDRKGYKYDVRRYKCETC | | | |
| | | | | | | | | | | SKNKDVKNVSFNESEVEN | | | |
| | | | | | | | | | | KFVNLLKSYELNKFHIRKV | | | |
| | | | | | | | | | | EPVKKIEYDIDKINKQKINY | | | |
| | | | | | | | | | | TRSWSLGYIEDDEYFELM | | | |
| | | | | | | | | | | EEINATKKMIEEQTTENKQ | | | |
| | | | | | | | | | | SVSKEQIQSINNFILKGWE | | | |
| | | | | | | | | | | ELTIKDKEELILSTVDKIEFN | | | |
| | | | | | | | | | | FIPKDKKHK | | | |
| | | | | | | | | | | TNTLDINNIHFKFS* | | | |

[0265] Sequences of insertion sites (i.e., recognition target sites) suitable for use in embodiments of the disclosure are presented below (Table 11). FIGS. 14A-14E shows analysis of effect of variant AttP sites on integration efficiency.

TABLE 11

| | | SEQ | Reverse | SEQ |
|---|---|---|---|---|
| | Forward | ID | Sequence | ID |
| Description | Sequence (5′-3′) | NO: | (5′-3′) | NO: |
| Bxb1_AttP. | GTGGTTTGTCTGGTC | SEQ | TGGGTTTGTACCGTA | SEQ |
| GT_original | AACCACCGCGGTCTC | ID | CACCACTGAGACCGC | ID |
| site | AGTGGTGTACGGTAC | NO: | GGTGGTTGACCAGAC | NO: |
| | AAACCCA | 394 | AAACCAC | 473 |
| Bxb1_AttP | GTGGTTTGTCTGGTC | 395 | TGGGTTTGTACCGTA | 474 |
| CG_site | AACCACCGCGcgCTC | | CACCACTGAGCGCGC | |
| | AGTGGTGTACGGTAC | | GGTGGTTGACCAGAC | |
| | AAACCCA | | AAACCAC | |
| Bxb1_AttP. | GTGGTTTGTCTGGTC | 396 | TGGGTTTGTACCGTA | 475 |
| GC_site | AACCACCGCGgcCTC | | CACCACTGAGGCCGC | |
| | AGTGGTGTACGGTAC | | GGTGGTTGACCAGAC | |
| | AAACCCA | | AAACCAC | |
| Bxb1_AttP_A | GTGGTTTGTCTGGTC | 397 | TGGGTTTGTACCGTA | 476 |
| T_site | AACCACCGCGatCTC | | CACCACTGAGATCGC | |
| | AGTGGTGTACGGTAC | | GGTGGTTGACCAGAC | |
| | AAACCCA | | AAACCAC | |
| Bxb1_AttP_T | GTGGTTTGTCTGGTC | 398 | TGGGTTTGTACCGTA | 477 |
| A_site | AACCACCGCGtaCTC | | CACCACTGAGTACGC | |
| | AGTGGTGTACGGTAC | | GGTGGTTGACCAGAC | |
| | AAACCCA | | AAACCAC | |
| Bxb1_AttP. | GTGGTTTGTCTGGTC | 399 | TGGGTTTGTACCGTA | 478 |
| GG_site | AACCACCGCGggCTC | | CACCACTGAGCCCGC | |
| | AGTGGTGTACGGTAC | | GGTGGTTGACCAGAC | |
| | AAACCCA | | AAACCAC | |
| Bxb1_AttP_T | GTGGTTTGTCTGGTC | 400 | TGGGTTTGTACCGTA | 479 |
| T_site | AACCACCGCGttCTC | | CACCACTGAGAACGC | |
| | AGTGGTGTACGGTAC | | GGTGGTTGACCAGAC | |
| | AAACCCA | | AAACCAC | |
| Bxb1_AttP | GTGGTTTGTCTGGTC | 401 | TGGGTTTGTACCGTA | 480 |
| GA_site | AACCACCGCGgaCTC | | CACCACTGAGTCCGC | |
| | AGTGGTGTACGGTAC | | GGTGGTTGACCAGAC | |
| | AAACCCA | | AAACCAC | |
| Bxb1_AttP_A | GTGGTTTGTCTGGTC | 402 | TGGGTTTGTACCGTA | 481 |
| G_site | AACCACCGCGagCTC | | CACCACTGAGCTCGC | |
| | AGTGGTGTACGGTAC | | GGTGGTTGACCAGAC | |
| | AAACCCA | | AAACCAC | |
| Bxb1_AttP | GTGGTTTGTCTGGTC | 403 | TGGGTTTGTACCGTA | 482 |
| CC_site | AACCACCGCGccCTC | | CACCACTGAGGGCGC | |
| | AGTGGTGTACGGTAC | | GGTGGTTGACCAGAC | |
| | AAACCCA | | AAACCAC | |
| Bxb1_AttP_T | GTGGTTTGTCTGGTC | 404 | TGGGTTTGTACCGTA | 483 |
| C_site | AACCACCGCGtcCTC | | CACCACTGAGGACGC | |
| | AGTGGTGTACGGTAC | | GGTGGTTGACCAGAC | |
| | AAACCCA | | AAACCAC | |
| Bxb1_AttP. | GTGGTTTGTCTGGTC | 405 | TGGGTTTGTACCGTA | 484 |
| CT_site | AACCACCGCGctCTC | | CACCACTGAGAGCGC | |
| | AGTGGTGTACGGTAC | | GGTGGTTGACCAGAC | |
| | AAACCCA | | AAACCAC | |
| Bxb1_AttP_A | GTGGTTTGTCTGGTC | 406 | TGGGTTTGTACCGTA | 485 |
| A_site | AACCACCGCGaaCTC | | CACCACTGAGTTCGC | |
| | AGTGGTGTACGGTAC | | GGTGGTTGACCAGAC | |
| | AAACCCA | | AAACCAC | |
| Bxb1_AttP. | GTGGTTTGTCTGGTC | 407 | TGGGTTTGTACCGTA | 486 |
| CA_site | AACCACCGCGcaCTC | | CACCACTGAGTGCGC | |
| | AGTGGTGTACGGTAC | | GGTGGTTGACCAGAC | |
| | AAACCCA | | AAACCAC | |
| Bxb1_AttP_A | GTGGTTTGTCTGGTC | 408 | TGGGTTTGTACCGTA | 487 |
| C site | AACCACCGCGacCTC | | CACCACTGAGGTCGC | |
| | AGTGGTGTACGGTAC | | GGTGGTTGACCAGAC | |
| | AAACCCA | | AAACCAC | |
| Bxb1_AttP_T | GTGGTTTGTCTGGTC | 409 | TGGGTTTGTACCGTA | 488 |
| G site | AACCACCGCGtgCTC | | CACCACTGAGCACGC | |
| | AGTGGTGTACGGTAC | | GGTGGTTGACCAGAC | |
| | AAACCCA | | AAACCAC | |
| Bxb1_AttB_4 | GGCCGGCTTGTCGAC | 410 | CCGGATGATCCTGAC | 489 |
| 6_GT_ | GACGGCGGTCTCCGT | | GACGGAGACCGCCGT | |
| original_site | CGTCAGGATCATCCG | | CGTCGACAAGCCGGC | |
| | G | | C | |
| Bxb1_AttB_4 | GGCCGGCTTGTCGAC | 411 | CCGGATGATCCTGAC | 490 |
| 6_AA_site | GACGGCGaaCTCCGT | | GACGGAGTTCGCCGT | |
| | CGTCAGGATCATCCG | | CGTCGACAAGCCGGC | |
| | G | | C | |
| Bxb1_AttB_4 | GGCCGGCTTGTCGAC | 412 | CCGGATGATCCTGAC | 491 |
| 6_GA_site | GACGGCGgaCTCCGT | | GACGGAGTCCGCCGT | |
| | CGTCAGGATCATCCG | | CGTCGACAAGCCGGC | |
| | G | | C | |
| Bxb1_AttB_4 | GGCCGGCTTGTCGAC | 413 | CCGGATGATCCTGAC | 492 |
| 6_CA_site | GACGGCGcaCTCCGT | | GACGGAGTGCGCCGT | |
| | CGTCAGGATCATCCG | | CGTCGACAAGCCGGC | |
| | G | | C | |
| Bxb1_AttB_4 | GGCCGGCTTGTCGAC | 414 | CCGGATGATCCTGAC | 493 |
| 6_TA_site | GACGGCGtaCTCCGT | | GACGGAGTACGCCGT | |
| | CGTCAGGATCATCCG | | CGTCGACAAGCCGGC | |
| | G | | C | |
| Bxb1_AttB_4 | GGCCGGCTTGTCGAC | 415 | CCGGATGATCCTGAC | 494 |
| 6_AG_site | GACGGCGagCTCCGT | | GACGGAGCTCGCCGT | |
| | CGTCAGGATCATCCG | | CGTCGACAAGCCGGC | |
| | G | | C | |
| Bxb1_AttB_4 | GGCCGGCTTGTCGAC | 416 | CCGGATGATCCTGAC | 495 |
| 6_GG_site | GACGGCGggCTCCGT | | GACGGAGCCCGCCGT | |
| | CGTCAGGATCATCCG | | CGTCGACAAGCCGGC | |
| | G | | C | |
| Bxb1_AttB_4 | GGCCGGCTTGTCGAC | 417 | CCGGATGATCCTGAC | 496 |
| 6_CG_site | GACGGCGcgCTCCGT | | GACGGAGCGCGCCGT | |
| | CGTCAGGATCATCCG | | CGTCGACAAGCCGGC | |
| | G | | C | |
| Bxb1_AttB_4 | GGCCGGCTTGTCGAC | 418 | CCGGATGATCCTGAC | 497 |
| 6_TG_site | GACGGCGtgCTCCGT | | GACGGAGCACGCCGT | |
| | CGTCAGGATCATCCG | | CGTCGACAAGCCGGC | |
| | G | | C | |
| Bxb1_AttB_4 | GGCCGGCTTGTCGAC | 419 | CCGGATGATCCTGAC | 498 |
| 6_AC_site | GACGGCGacCTCCGT | | GACGGAGGTCGCCGT | |
| | CGTCAGGATCATCCG | | CGTCGACAAGCCGGC | |
| | G | | C | |
| Bxb1_AttB_4 | GGCCGGCTTGTCGAC | 420 | CCGGATGATCCTGAC | 499 |
| 6_GC_site | GACGGCGgcCTCCGT | | GACGGAGGCCGCCGT | |
| | CGTCAGGATCATCCG | | CGTCGACAAGCCGGC | |
| | G | | C | |
| Bxb1_AttB_4 | GGCCGGCTTGTCGAC | 421 | CCGGATGATCCTGAC | 500 |
| 6_CC_site | GACGGCGccCTCCGT | | GACGGAGGGCGCCGT | |
| | CGTCAGGATCATCCG | | CGTCGACAAGCCGGC | |
| | G | | C | |
| Bxb1_AttB_4 | GGCCGGCTTGTCGAC | 422 | CCGGATGATCCTGAC | 501 |
| 6_TC_site | GACGGCGtcCTCCGT | | GACGGAGGACGCCGT | |
| | CGTCAGGATCATCCG | | CGTCGACAAGCCGGC | |
| | G | | C | |
| Bxb1_AttB_4 | GGCCGGCTTGTCGAC | 423 | CCGGATGATCCTGAC | 502 |
| 6_AT_site | GACGGCGatCTCCGT | | GACGGAGATCGCCGT | |
| | CGTCAGGATCATCCG | | CGTCGACAAGCCGGC | |
| | G | | C | |
| Bxb1_AttB_4 | GGCCGGCTTGTCGAC | 424 | CCGGATGATCCTGAC | 503 |
| 6_CT_site | GACGGCGctCTCCGT | | GACGGAGAGCGCCGT | |
| | CGTCAGGATCATCCG | | CGTCGACAAGCCGGC | |
| | G | | C | |
| Bxb1_AttB_4 | GGCCGGCTTGTCGAC | 425 | CCGGATGATCCTGAC | 504 |
| 6_TT_site | GACGGCGttCTCCGT | | GACGGAGAACGCCGT | |
| | CGTCAGGATCATCCG | | CGTCGACAAGCCGGC | |
| | G | | C | |
| Bxb1_AttB_3 | GGCTTGTCGACGACG | 426 | ATGATCCTGACGACG | 505 |
| 8_GT_site | GCGGTCTCCGTCGTC | | GAGACCGCCGTCGTC | |
| | AGGATCAT | | GACAAGCC | |
| Bxb1_AttB_3 | GGCTTGTCGACGACG | 427 | ATGATCCTGACGACG | 506 |
| 8_AA_site | GCGaaCTCCGTCGTC | | GAGTTCGCCGTCGTC | |
| | AGGATCAT | | GACAAGCC | |
| Bxb1_AttB_3 | GGCTTGTCGACGACG | 428 | ATGATCCTGACGACG | 507 |
| 8_GA_site | GCGgaCTCCGTCGTC | | GAGTCCGCCGTCGTC | |
| | AGGATCAT | | GACAAGCC | |
| Bxb1_AttB_3 | GGCTTGTCGACGACG | 429 | ATGATCCTGACGACG | 508 |
| 8_CA_site | GCGcaCTCCGTCGTC | | GAGTGCGCCGTCGTC | |
| | AGGATCAT | | GACAAGCC | |
| Bxb1_AttB_3 | GGCTTGTCGACGACG | 430 | ATGATCCTGACGACG | 509 |
| 8_TA_site | GCGtaCTCCGTCGTC | | GAGTACGCCGTCGTC | |
| | AGGATCAT | | GACAAGCC | |
| Bxb1_AttB_3 | GGCTTGTCGACGACG | 431 | ATGATCCTGACGACG | 510 |
| 8_AG_site | GCGagCTCCGTCGTC | | GAGCTCGCCGTCGTC | |
| | AGGATCAT | | GACAAGCC | |
| Bxb1_AttB_3 | GGCTTGTCGACGACG | 432 | ATGATCCTGACGACG | 511 |
| 8_GG_site | GCGggCTCCGTCGTC | | GAGCCCGCCGTCGTC | |
| | AGGATCAT | | GACAAGCC | |
| Bxb1_AttB_3 | GGCTTGTCGACGACG | 433 | ATGATCCTGACGACG | 512 |
| 8_CG_site | GCGcgCTCCGTCGTC | | GAGCGCGCCGTCGTC | |
| | AGGATCAT | | GACAAGCC | |
| Bxb1_AttB_3 | GGCTTGTCGACGACG | 434 | ATGATCCTGACGACG | 513 |
| 8_TG_site | GCGtgCTCCGTCGTC | | GAGCACGCCGTCGTC | |
| | AGGATCAT | | GACAAGCC | |
| Bxb1_AttB_3 | GGCTTGTCGACGACG | 435 | ATGATCCTGACGACG | 514 |
| 8_AC_site | GCGacCTCCGTCGTC | | GAGGTCGCCGTCGTC | |
| | AGGATCAT | | GACAAGCC | |
| Bxb1_AttB_3 | GGCTTGTCGACGACG | 436 | ATGATCCTGACGACG | 515 |
| 8_GC_site | GCGgcCTCCGTCGTC | | GAGGCCGCCGTCGTC | |
| | AGGATCAT | | GACAAGCC | |
| Bxb1_AttB_3 | GGCTTGTCGACGACG | 437 | ATGATCCTGACGACG | 516 |
| 8_CC_site | GCGccCTCCGTCGTC | | GAGGGCGCCGTCGTC | |
| | AGGATCAT | | GACAAGCC | |
| Bxb1_AttB_3 | GGCTTGTCGACGACG | 438 | ATGATCCTGACGACG | 517 |
| 8_TC_site | GCGtcCTCCGTCGTC | | GAGGACGCCGTCGTC | |
| | AGGATCAT | | GACAAGCC | |
| Bxb1_AttB_3 | GGCTTGTCGACGACG | 439 | ATGATCCTGACGACG | 518 |
| 8_AT_site | GCGatCTCCGTCGTC | | GAGATCGCCGTCGTC | |
| | AGGATCAT | | GACAAGCC | |
| Bxb1_AttB_3 | GGCTTGTCGACGACG | 440 | ATGATCCTGACGACG | 519 |
| 8_CT_site | GCGctCTCCGTCGTC | | GAGAGCGCCGTCGTC | |
| | AGGATCAT | | GACAAGCC | |
| Bxb1_AttB_3 | GGCTTGTCGACGACG | 441 | ATGATCCTGACGACG | 520 |
| 8_TT_site | GCGttCTCCGTCGTC | | GAGAACGCCGTCGTC | |
| | AGGATCAT | | GACAAGCC | |
| Cre Lox 66 | TACCGTTCGTATAAT | 442 | ATAACTTCGTATAGC | 521 |
| site | GTATGCTATACGAAG | | ATACATTATACGAAC | |
| | TTAT | | GGTA | |
| Cre Lox 71 | ATAACTTCGTATAAT | 443 | TACCGTTCGTATAGC | 522 |
| site | GTATGCTATACGAAC | | ATACATTATACGAAG | |
| | GGTA | | TTAT | |
| TP901-1 | TTTACCTTGATTGAG | 444 | CACAATTAACATCTC | 523 |
| minimal AttB | ATGTTAATTGTG | | AATCAAGGTAAA | |
| site | | | | |
| TP901-1 | GCGAGTTTTTATTTC | 445 | AAAGGAGTTTTTTAG | 524 |
| minimal AttP | GTTTATTTCAATTAA | | TTACCTTAATTGAAA | |
| site | GGTAACTAAAAAACT | | TAAACGAAATAAAAA | |
| | CCTTT | | CTCGC | |
| PhiBT1 | CTGGATCATCTGGAT | 446 | CAGGTTTTTGACGAA | 525 |
| minimal AttB | CACTTTCGTCAAAAA | | AGTGATCCAGATGAT | |
| site | CCTG | | CCAG | |
| PhiBT1 | TTCGGGTGCTGGGTT | 447 | TGGTGCTGAGTAGTT | 526 |
| minimal AttP | GTTGTCTCTGGACAG | | TCCCATGGATCACTG | |
| site | TGATCCATGGGAAAC | | TCCAGAGACAACAAC | |
| | TACTCAGCACCA | | CCAGCACCCGAA | |
| Bacillus_ | gatatggggaagtga | 448 | ggtactgtggcggtt | 527 |
| cereus_AH1 | atcagtacaaccgcc | | gtactgattcacttc | |
| 87_Int30_38 | acagtacc | | cccatatc | |
| bp_Att | | | | |
| Staphylococcus_ | tgggtggtacaggtg | 449 | cataaatggtacaac | 528 |
| lugdunensis_ | ccacattagttgtac | | taatgtggcacctgt | |
| N920143 | catttatg | | accaccca | |
| Int1 | | | | |
| 2_38bp_Att | | | | |
| Bacillus_ | gttgtttttccagat | 450 | cttatatttacagga | 529 |
| cytotoxicus_ | ccagttggtcctgta | | ccaactggatctgga | |
| NVH_391- | aatataag | | aaaacaac | |
| 98_Int13_38 | | | | |
| bp_Att | | | | |
| Bacillus_ | tggggaagtgaatca | 451 | ctgtggcggttgtac | 454 |
| cereus_ | gtacaaccgccacag | | tgattcacttcccca | |
| AH187_ | | | | |
| Int30_ | | | | |
| Att30 | | | | |
| Bacillus_ | ggggaagtgaatcag | 452 | tgtggcggttgtact | 455 |
| cereus_ | tacaaccgccaca | | gattcacttcccc | |
| AH187_ | | | | |
| Int30_ | | | | |
| Att28 | | | | |
| Bacillus_ | gggaagtgaatcagt | 453 | gtggcggttgtactg | 456 |
| cereus_ | acaaccgccac | | attcacttccc | |
| AH187_ | | | | |
| Int30_ | | | | |
| Att26 | | | | |
| Bacillus_ | ctgtggcggttgtac | 454 | tggggaagtgaatca | 451 |
| cereus_ | tgattcacttcccca | | gtacaaccgccacag | |
| AH187_ | | | | |
| Int30_ | | | | |
| Att_ | | | | |
| rc_ | | | | |
| 30 | | | | |
| Bacillus_ | tgtggcggttgtact | 455 | ggggaagtgaatcag | 452 |
| cereus_ | gattcacttcccc | | tacaaccgccaca | |
| AH187_ | | | | |
| Int30_ | | | | |
| Att_ | | | | |
| rc_ | | | | |
| 28 | | | | |
| Bacillus_ | gtggcggttgtactg | 456 | gggaagtgaatcagt | 453 |
| cereus_ | attcacttccc | | acaaccgccac | |
| AH187_ | | | | |
| Int30_ | | | | |
| Att_ | | | | |
| rc_ | | | | |
| 26 | | | | |
| Bacillus_ | tttttccagatccag | 457 | tatttacaggaccaa | 460 |
| cytotoxicus_ | ttggtcctgtaaata | | ctggatctggaaaaa | |
| NVH_ | | | | |
| 391-98_ | | | | |
| Int13_ | | | | |
| Att_ | | | | |
| 30 | | | | |
| Bacillus_ | ttttccagatccagt | 458 | atttacaggaccaac | 461 |
| cytotoxicus_ | tggtcctgtaaat | | tggatctggaaaa | |
| NVH_ | | | | |
| 391-98_ | | | | |
| Int13_ | | | | |
| Att28 | | | | |
| Bacillus_ | tttccagatccagtt | 459 | tttacaggaccaact | 462 |
| cytotoxicus_ | ggtcctgtaaa | | ggatctggaaa | |
| NVH_ | | | | |
| 391-98_ | | | | |
| Int13_ | | | | |
| Att26 | | | | |
| Bacillus_ | tatttacaggaccaa | 460 | tttttccagatccag | 457 |
| cytotoxicus_ | ctggatctggaaaaa | | ttggtcctgtaaata | |
| NVH_ | | | | |
| 391-98_ | | | | |
| Int13_ | | | | |
| Att_ | | | | |
| rc_ | | | | |
| 30 | | | | |
| Bacillus_ | atttacaggaccaac | 461 | ttttccagatccagt | 458 |
| cytotoxicus_ | tggatctggaaaa | | tggtcctgtaaat | |
| NVH_ | | | | |
| 391-98_ | | | | |
| Int13_ | | | | |
| Attrc_ | | | | |
| 28 | | | | |
| Bacillus_ | tttacaggaccaact | 462 | tttccagatccagtt | 459 |
| cytotoxicus_ | ggatctggaaa | | ggtcctgtaaa | |
| NVH_ | | | | |
| 391-98_ | | | | |
| Int13_ | | | | |
| Att_ | | | | |
| rc_ | | | | |
| 26 | | | | |
| N680429_56 | CATTATATGTTTTTA | 1463 | cattatatgttctta | 530 |
| 0_31_50bp | CAATCCGGGCCGCCA | | cagtatggcggcccg | |
| | TACTGTAAGAACATA | | gattgtaaaaacata | |
| | TAATG | | taatg | |
| N191607_8 | CGTTATAGGGTATTG | 1464 | cgttatagggtatta | 531 |
| 101_50bp | CAGTACCGACCGCCA | | cagtatggcggtcgg | |
| | TACTGTAATACCCTA | | tactgcaatacccta | |
| | TAACG | | taacg | |
| N674992_1_ | TGTATCATTTTCATA | 1465 | tgtatcattttcata | 532 |
| 1308_50bp | TAGTGTGCAGGTGCT | | tagttagcacctgca | |
| | AACTATATGAAAATG | | cactatatgaaaatg | |
| | ATACA | | ataca | |
| N684613_54 | TGTCTACTATGTCTT | 466 | tgtctactatctgta | 533 |
| _96_50bp | TATGCCACATGTGTC | | tatgcgacacatgtg | |
| | GCATATACAGATAGT | | gcataaagacatagt | |
| | AGACA | | agaca | |
| N252616_12 | AATGAGGTCAGACGC | 467 | catcgaccctgacgc | 534 |
| 1_74_50bp | ATGGAGCGCCGCCTC | | atgcggaggcggcgc | |
| | CGCATGCGTCAGGGT | | tccatgcgtctgacc | |
| | CGATG | | tcatt | |
| N683040_22 | GTTAGTACCCAAATG | 468 | gttagtacccaaatg | 535 |
| 2_19_50bp | ATAAAAGGATGACCT | | acaaaaggtcatcct | |
| | TTTGTCATTTGGGTA | | tttatcatttgggta | |
| | CTAAC | | ctaac | |
| N687537_17 | GTTTATAAAACCGAT | 469 | cttattaaaacccgt | 536 |
| 3_59_50bp | GCCGCTTTGACAGAA | | tccgcttctgtcaaa | |
| | GCGGAACGGGTTTTA | | gcggcatcggtttta | |
| | ATAAG | | taaac | |
| N183629_47_ | GGCCGCGAGGTCGTG | 470 | ggcgtgatggtcgtg | 537 |
| 40_50b p | TTCGTCGTCATGTTG | | aacctcaacatgacg | |
| | AGGTTCACGACCATC | | acgaacacgacctcg | |
| | ACGCC | | cggcc | |
| N191533_22 | TATAAACTGATATAA | 1471 | tctacatcttgaata | 538 |
| 4_76_50bp | TTCAAAGTTATAACT | | tatcaagttataact | |
| | TGATATATTCAAGAT | | ttgaattatatcagt | |
| | GTAGA | | ttata | |
| N682356_18 | TATTATATCTAAAAG | 472 | aattatatctaaaag | 539 |
| 8_20_50 bp | CAGTATGGCGGAGCT | | cactaagctccgcca | |
| | TAGTGCTTTTAGATA | | tactgcttttagata | |
| | TAATT | | taata | |

[0266] In some embodiments, the integration enzyme is selected from one of the about 27,000 Serine integrases described in International Patent Publication No. WO 2023/070031A2, such as SEQ ID NOs: 1-16 and 163-1162 and 3166-3175 of WO2023/070031 (which PCT publication is hereby incorporated by reference in its entirety).

[0267] Other suitable integrase (such as the eLSR described herein) suitable for use with the invention described herein includes SEQ ID NOs: 85-158 of WO2023/177424 (which PCT publication is hereby incorporated by reference in its entirety).

### 6.9. Engineered Integration Enzymes

[0268] This disclosure features integration enzymes (also referred to integrases or eLSR) engineered such that upon being introduced into a cell, the integration enzyme has increased fidelity and stability (e.g., half-life) compared to a control integration enzyme not engineered to have increased stability (cLSR). An increased fidelity entails substantially maintaining or enhancing integration activity at a pair of cognate integration recognition sites, and substantially decreasing off-target integration activity at a pair of off-target integration recognition sites, when compared to a corresponding large serine integrase without said one or more substitutions (cLSR). An increase in stability includes an increase in half-life and a reduction in protein degradation rates, thereby extending the capacity of the integration enzyme to mediate integration.

[0269] Without wishing to be bound by theory, it is believed that off-target integration of a donor DNA by integrase is partially influenced by the sequence similarity between the cognate integration recognition sequences of the integrase (such as the attB and attP sites) and the non-cognate integration recognition sequences, such as the off-target integration recognition sites CAS031 attB sequence and CAS031 attP sequence; and the CAS421 attB sequence and CAS421 attP sequence (see FIG. 59). It is further believed that such sequence similarity tends to be concentrated in the integrase recombinase domain (RD) binding/interacting region, and to a less extent in the ZD domain. Hence mutating certain residues in the ZD could reduce off-target integration.

[0270] Also, without wishing to be bound by theory, there are two main pathways for protein degradation: proteolysis by ubiquitin proteosome system (UPS) and autophagy. Under the UPS system, proteins can be ubiquitinated on lysine residues, thereby leading to degradation. Proteins can also have specific domains (degrons) that can be ubiquitinated, which also leads to protein degradation. For example, in the UPS, Degrons (also referred to as degradation signals) are recognized and polyubiquitinated, targeting the protein for degradation. Degrons can be present at both the N-terminus and/or C-terminus of a protein. Polyubiquitinated protein is recognized by receptor subunits of the 26S proteosome (Rpn10 (yeast)/p54 (drosophila), Rpn13 and Rpn1).

[0271] In some embodiments, the engineered integration enzymes is selected from the engineered integration enzymes described in FIGS. 23, 25, 28, 30B, 32A, 33, 35, and 40-42. In some embodiments, the engineered integration enzymes is selected from the engineered integration enzymes described in Table 26. In some embodiments, the engineered integration enzyme comprises an amino acid sequence that is at least 80% (e.g., 80%, 85%, 90%, 91%, 92%, 93%, 94%, 95%, 96%, 97%, 99%, or 100%) identical to an amino acid sequence listed in Table 26. In some embodiments, the engineered integration enzyme is encoded by a nucleic acid sequence that is at least 80% (e.g., 80%, 85%, 90%, 91%, 92%, 93%, 94%, 95%, 96%, 97%, 99%, or 100%) identical to a nucleic acid sequence listed in Table 26.

### 6.9.1. Engineered Integration Enzyme with a High Fidelity Mutation

[0272] This disclosure features integration enzymes engineered to include a so-called high fidelity mutation (or HiFi mutation) that maintain or enhance integration activity at a pair of cognate integration recognition sites, and substantially decrease off-target integration activity at a pair of off-target integration recognition sites, when compared to a corresponding large serine integrase without said one or more substitutions (cLSR). In other words, the integration enzymes (e.g., engineered large serine integrase or eLSR) are engineered such that upon being introduced into a cell, the integration enzyme/eLSR has increased fidelity/specificity towards the cognate integration recognition sequences/sites at the target integration sequence, over off-target integration recognition sequences/sites at off-target integration sequences. The engineered large serine integrase (eLSR) described herein comprises one or more substitutions (e.g., substitutions in a zinc ribbon domain (ZD)) that substantially maintain or enhance integration activity at a pair of cognate integration recognition sites, and substantially decrease off-target integration activity at a pair of off-target integration recognition sites, when compared to a corresponding large serine integrase without said one or more substitutions (cLSR).

[0273] In certain embodiments, the one or more substitutions are in a zinc ribbon domain (ZD) of the cLSR.

[0274] In certain embodiments, the cLSR comprises an amino acid sequence that is at least 80% identical to any one of (a) SEQ ID NOs: 378-393; (b) SEQ ID NOs: 85-158 of WO2023/177424 (incorporated herein by reference); and (c) SEQ ID NOs: 1-16 and 163-1162 and 3166-3175 of WO2023/070031 (incorporated herein by reference).

[0275] Although many of the examples herein are based on one representative eLSR—the Bxb1 LSR, the disclosure herein is not so limited, since other LSRs with similar sequence or structure can be readily engineered similarly as Bxb1, based on identifying corresponding amino acids at the positions in Bxb1, e.g., residues 315, 318, 319, and 329 of Bxb1 (such as SEQ ID NO: 388), to make similar mutations to enhance on-target integration at the cognate integration recognition sequences, and/or to reduce or even eliminate off-target integration at the non-cognate integration recognition sequences.

[0276] In certain embodiments, the corresponding residues in the ZD domain can be identified through sequence alignment between Bxb1 (such as SEQ ID NO: 388) and any other LSRs.

[0277] In certain embodiments, the corresponding residues in the ZD domain can be identified through structural similarity between Bxb1 (such as SEQ ID NO: 388) and any other LSRs. This is particularly helpful when sequence identity between the LSRs is low, yet the overall three-dimensional foldings are similar or substantially the same.

[0278] In certain embodiments, the cLSR is a BxB1 polypeptide, SsuINT, SssINT, SscINT, Ssc2INT, SsdINT, SmcINT, UhmINT, SacINT, RsaINT, Rsa2INT, Bxb1, Tp91NT, Bt1INT, BceINT, BcyINT, SluINT, or a functional fragment/variant thereof.

[0279] In certain embodiments, the cLSR is a BxB1 polypeptide or a functional fragment/variant thereof.

[0280] In certain embodiments, the cLSR comprises an amino acid sequence having at least 80% sequence identity to SEQ ID NO: 388. In certain embodiments, the cLSR has an amino acid sequence of SEQ ID NO: 388.

[0281] In certain embodiments, the pair of cognate integration recognition sites are: an attB sequence and an attP sequence; or a modified AttB sequence and a modified AttP sequence.

[0282] In certain embodiments, the pair of off-target integration recognition sites are CAS031 attB sequence and CAS031 attP sequence; or CAS421 attB sequence and CAS421 attP sequence. See FIG. 59.

[0283] In certain embodiments, at least one of the pair of cognate integration recognition sites is integrated into a mammalian cell genome at a target DNA sequence. In certain embodiments, the at least one of the pair of cognate integration recognition sites is integrated into the mammalian cell genome at the target DNA sequence by: (1) programmable addition through site-specific targeting elements (PASTE) using a n attachment site-containing guide RNA (atgRNA) and a gene editor polypeptide; (2) homology directed repair (HDR), such as short-fragment homologous recombination (SFHR); (3) ligation-assisted homologous recombination (LAHR); (4) ligation-assisted Replacer (e.g., Replacer 1 or Replacer 2) editing; or, (5) non-homologous end joining (NHEJ), such as homology-independent targeted insertion (HITI).

[0284] Programmable Addition via Site-specific Targeting Elements (PASTE) herein refers to a gene editing tool that uses a CRISPR-Cas9 nickase fused to both a reverse transcriptase and serine integrase for targeted genomic recruitment and integration of desired payloads (e.g., “beacon” or integration recognition sequences/sites for the LSR of the invention). This insertion can be done without introducing double-stranded breaks by adding one DNA strand first via a fused reverse transcriptase, then its complementary strand. See Ionnidi et al.; doi: 10.1101/2021.11.01.466786 (the entirety of Ionnidi et al. is incorporated by reference). Non-limiting examples of PASTE are also described in U.S. Pat. No. 11,572,556 and PCT Publication Nos. WO 2022/087235A and WO 2023/077148A1, each of which are hereby incorporated by reference in their entireties.

[0285] Homology-directed repair (HDR) is a process where a DNA double-strand break (DSB) is repaired by homologous recombination using a DNA template (e.g., a DNA template comprising the beacon or integration recognition sequences/sites flanked by two homologous arm sequences for integrating the beacon into a target site at the DSB region.

[0286] Small fragment homologous replacement (SFHR) is a type of HDR. It is characterized by the use of small exogenous DNA fragments (SDFs, up to 1 kb, such as the beacon or integration recognition sequences/sites for the LSR of the invention). Small DNA fragments (SDFs) are used in SFHR to modify endogenous genomic DNA (e.g., insertion of the beacon at the endogenous genomic DNA sequence as the target integration locus). SFHR involves an interaction between the SDF sequence (e.g., wild-type SDF sequence) and the target endogenous sequence (e.g., mutated endogenous sequence).

[0287] Non-homologous end joining (NHEJ) is a pathway that repairs double-strand breaks in DNA. It is called “non-homologous” because the break ends are directly ligated without the need for a homologous template, in contrast to homology directed repair (HDR), which requires a homologous sequence to guide repair. In this case, the beacon or the integration recognition sequences/sites for the LSR of the invention can be provided as donor DNA that can be integrated into the target genomic location around the DSB via NHEJ.

[0288] Ligation-Assisted Homologous Recombination” (LAHR) was discovered in association with Cas12a. Unlike the blunt-ended DSB generated by Cas9, Cas12a generates sticky-ended DSB that can aid precise genome editing. A short double-stranded DNA (dsDNA) repair template (such as one comprising the beacon or the integration recognition sequences/sites for the LSR of the invention) containing a sticky end that matched one of the Cas12a-generated DSB ends and a homologous arm sharing homology with the genomic region adjacent to the other end of the DSB enables precise repair of the DSB and introduced a desired nucleotide substitution. This strategy is termed “Ligation-Assisted Homologous Recombination” (LAHR).

[0289] Ligation-assisted Replacer editing herein refers to a nucleic acid editing process. It includes ligation of an integrating nucleic acid (such as the beacon or the integration recognition sequences/sites for the LSR of the invention) to a target nucleic acid and replacement of a portion of the target nucleic acid with the integrating nucleic acid. In some embodiments, the method ligation-assisted Replacer editing refers to what is described in International Patent Publication No. WO2023086834A1, which is herein incorporated by reference in its entirety.

[0290] In certain embodiments, the one or more substitutions are at a position corresponding to residue 315, residue 318, residue 319, and/or residue 320 of SEQ ID NO: 388.

[0291] In certain embodiments, the one or more substitutions are at a position corresponding to residue 315 of SEQ ID NO: 388, residue 318 of SEQ ID NO: 388, residue 319 of SEQ ID NO: 388, or residue 320 of SEQ ID NO: 388. In certain embodiments, the one or more substitutions are at a position corresponding to residue 315 of SEQ ID NO: 388. In certain embodiments, the one or more substitutions are at a position corresponding to residue 318 of SEQ ID NO: 388. In certain embodiments, the one or more substitutions are at a position corresponding to residue 319 of SEQ ID NO: 388. In certain embodiments, the one or more substitutions are at a position corresponding to residue 320 of SEQ ID NO: 388.

[0292] In certain embodiments, the one or more substitutions comprise a single residue substitution. In certain embodiments, the single residue substitution is at a position corresponding to residue 315 of SEQ ID NO: 388. In certain embodiments, the single residue substitution is at a position corresponding to residue 318 of SEQ ID NO: 388. In certain embodiments, the single residue substitution is at a position corresponding to residue 319 of SEQ ID NO: 388. In certain embodiments, the single residue substitution is at a position corresponding to residue 320 of SEQ ID NO: 388.

[0293] In certain embodiments, the single residue substitution is to any of the other 19 proteinogenic amino acids different from the original amino acid at such positions. For example, if the single residue substitution is at a position corresponding to residue K320 of SEQ ID NO: 388, the substituted residue can be any one of A, C, D, E, F, G, H, I, L, M, N, P, Q, R, S, T, V, W, and Y, such as E (i.e., K320E).

[0294] In certain embodiments, the single residue substitution is to an amino acid in a different category as the original amino acid. In this regard, the 20 proteinogenic amino acids can be grouped into different categories, including basic amino acids comprising K, R, and H; acidic amino acids comprising D and E; polar amino acids comprising S, T, Q, and N; non-polar or aliphatic/hydrophobic amino acids comprising: A, V, I, L, and M; aromatic amino acids comprising: F, Y, and W; and special amino acids comprising P, G, and C.

[0295] For example, residue K320 can be substituted by any one amino acid from the acidic amino acids (such as E or D), by any one amino acid from the polar amino acids; by any one amino acid from the non-polar or aliphatic/hydrophobic amino acids; by any one amino acid from the aromatic amino acids; or by any one amino acid from the special amino acids.

[0296] In certain embodiments, the single residue substitution is at a position corresponding to residue A315 of SEQ ID NO: 388, to a basic amino acid, to an acidic amino acid, to a polar amino acid; to a non-polar or aliphatic/hydrophobic amino acid; to an aromatic amino acid; or to a special amino acid. In certain embodiments, the single residue substitution is at a position corresponding to residue A315 of SEQ ID NO: 388, to an acidic amino acid, such as D or E. In certain embodiments, the single residue substitution is at a position corresponding to residue A315 of SEQ ID NO: 388, to a basic amino acid, such as R or K.

[0297] In certain embodiments, the one or more substitutions comprise or consist of a substitution to D (Asp), E (Glu) or R (Arg) at the position corresponding to residue 315 of SEQ ID NO: 388. In certain embodiments, the one or more substitutions comprise or consist of a substitution to R (Arg) at the position corresponding to residue 315 of SEQ ID NO: 388.

[0298] In certain embodiments, the single residue substitution is at a position corresponding to residue A318 of SEQ ID NO: 388, to a basic amino acid, to an acidic amino acid, to a polar amino acid; to a non-polar or aliphatic/hydrophobic amino acid; to an aromatic amino acid; or to a special amino acid. In certain embodiments, the single residue substitution is at a position corresponding to residue A318 of SEQ ID NO: 388, to an acidic amino acid, such as D or E.

[0299] In certain embodiments, the one or more substitutions comprise or consist of a substitution to E (Glu) at the position corresponding to residue 318 of SEQ ID NO: 388.

[0300] In certain embodiments, the single residue substitution is at a position corresponding to residue A319 of SEQ ID NO: 388, to a basic amino acid, to an acidic amino acid, to a polar amino acid; to a non-polar or aliphatic/hydrophobic amino acid; to an aromatic amino acid; or to a special amino acid. In certain embodiments, the single residue substitution is at a position corresponding to residue A319 of SEQ ID NO: 388, to a polar amino acid, such as Q or N.

[0301] In certain embodiments, the one or more substitutions comprise or consist of a substitution to Q (Gln) at the position corresponding to residue 319 of SEQ ID NO: 388.

[0302] In certain embodiments, the single residue substitution is at a position corresponding to residue A320 of SEQ ID NO: 388, to a basic amino acid, to an acidic amino acid, to a polar amino acid; to a non-polar or aliphatic/hydrophobic amino acid; to an aromatic amino acid; or to a special amino acid. In certain embodiments, the single residue substitution is at a position corresponding to residue A320 of SEQ ID NO: 388, to an acidic amino acid, such as D or E. In certain embodiments, the single residue substitution is at a position corresponding to residue A320 of SEQ ID NO: 388, to a basic amino acid, such as R or K. In certain embodiments, the single residue substitution is at a position corresponding to residue A320 of SEQ ID NO: 388, to a polar amino acid, such as Q or N. In certain embodiments, the single residue substitution is at a position corresponding to residue A320 of SEQ ID NO: 388, to an aromatic amino acid, such as F, W, or Y.

[0303] In certain embodiments, the one or more substitutions comprise or consist of a substitution to E (Glu), Q (Gln), or R (Arg) at the position corresponding to residue 320 of SEQ ID NO: 388. In certain embodiments, the one or more substitutions comprise or consist of a substitution to E (Glu) at the position corresponding to residue 320 of SEQ ID NO: 388. In certain embodiments, the one or more substitutions comprise or consist of a substitution to R (Arg) at the position corresponding to residue 320 of SEQ ID NO: 388.

[0304] In certain embodiments, the one or more substitutions do not include A315F, A315G, A315H, A3151, A315M, A315N, A315S, A315T, A315W, A315Y, G3181, G318K, G318R, and G318W.

[0305] In certain embodiments, the one or more substitutions comprise or consist of two of the four positions corresponding to residue 315 of SEQ ID NO: 388, residue 318 of SEQ ID NO: 388, residue 319 of SEQ ID NO: 388, and residue 320 of SEQ ID NO: 388. For example, the two positions can be 315 and 318, 315 and 319, 315 and 320, 318 and 319, 318 and 320, or 319 and 320. In each instant or combination, the substitutions at each one of the two positions can be independently as described above for single substitutions at each position.

[0306] In certain embodiments, the one or more substitutions comprise or consist of the position corresponding to residue 315 of SEQ ID NO: 388, and the position corresponding to residue 320 of SEQ ID NO: 388.

[0307] In certain embodiments, the one or more substitutions comprise or consist of a substitution to D (Asp), E (Glu) or R (Arg) at the position corresponding to residue 315 of SEQ ID NO: 388; and a substitution to E (Glu), Q (Gln), or R (Arg) at the position corresponding to residue 320 of SEQ ID NO: 388.

[0308] In certain embodiments, the one or more substitutions comprise or consist of a substitution to D at the position corresponding to residue 315 of SEQ ID NO: 388; and a substitution to E at the position corresponding to residue 320 of SEQ ID NO: 388.

[0309] In certain embodiments, the one or more substitutions comprise or consist of a substitution to E at the position corresponding to residue 315 of SEQ ID NO: 388; and a substitution to E at the position corresponding to residue 320 of SEQ ID NO: 388.

[0310] In certain embodiments, the one or more substitutions comprise or consist of a substitution to R at the position corresponding to residue 315 of SEQ ID NO: 388; and a substitution to E at the position corresponding to residue 320 of SEQ ID NO: 388.

[0311] In certain embodiments, the one or more substitutions comprise or consist of a substitution to D at the position corresponding to residue 315 of SEQ ID NO: 388; and a substitution to R at the position corresponding to residue 320 of SEQ ID NO: 388.

[0312] In certain embodiments, the one or more substitutions comprise or consist of a substitution to E at the position corresponding to residue 315 of SEQ ID NO: 388; and a substitution to R at the position corresponding to residue 320 of SEQ ID NO: 388.

[0313] In certain embodiments, the one or more substitutions comprise or consist of a substitution to R at the position corresponding to residue 315 of SEQ ID NO: 388; and a substitution to R at the position corresponding to residue 320 of SEQ ID NO: 388.

[0314] In certain embodiments, the one or more substitutions comprise or consist of three of the four positions corresponding to residue 315 of SEQ ID NO: 388, residue 318 of SEQ ID NO: 388, residue 319 of SEQ ID NO: 388, and residue 320 of SEQ ID NO: 388. For example, the three positions can be 315, 318, and 319; 315, 318, and 320; 318, 319, and 320; and 315, 319, and 320. In each instant or combination, the substitutions at each one of the two positions can be independently as described above for single substitutions at each position.

[0315] In certain embodiments, the one or more substitutions comprise or consist of all four positions corresponding to residue 315 of SEQ ID NO: 388, residue 318 of SEQ ID NO: 388, residue 319 of SEQ ID NO: 388, and residue 320 of SEQ ID NO: 388. In each instant or combination, the substitutions at each one of the two positions can be independently as described above for single substitutions at each position.

[0316] In certain embodiments, the integration activity at the pair of cognate integration recognition sites is at least about 200-fold, 300-fold, 400-fold, 500-fold, 600-fold, 700-fold, 800-fold, 900-fold, 1000-fold or more compared to the off-target integration activity at the pair of off-target integration recognition sites. For example, in certain embodiments, an engineered Bxb1 LSR may have an integration activity at the pair of cognate integration recognition sites (attB/attP) at least about 200-fold, 300-fold, 400-fold, 500-fold, 600-fold, 700-fold, 800-fold, 900-fold, 1000-fold or more compared to the off-target integration activity at the pair of off-target integration recognition sites (such as CAS031 or CAS421, See FIG. 59).

[0317] The integration activity of any eLSR can be assessed using any art-recognized method, and/or using any method as disclosed herein in, for example, the Examples (such as Examples 11-19).

### 6.9.2. Engineered Integration Enzyme with a Stabilization Domain

[0318] This disclosure further features integration enzymes (such as the eLSRs having a high fidelity mutation as described herein) are further engineered to include a domain (e.g., a stabilization domain) that increases stability of the integration enzyme when compared to an integration enzyme not engineered to include the domain (e.g., the stabilization domain).

[0319] In some embodiments, the integration enzyme or fragment thereof and the stabilization domain are fused, thereby by creating a fusion protein.

[0320] In one embodiment, an engineered integration enzyme comprises an integration enzyme or fragment thereof; an at least first stabilization domain; and a nuclear localization signal (NLS). In some embodiments, the integration enzyme or fragment thereof, the stabilization domain, and the NLS are fused, thereby by creating a fusion protein.

[0321] In some embodiments, the engineered integration enzyme is an integration enzyme described in Table 10 and engineered to include a stabilization domain that increases the stability of the BxB1 as compared to an Bxb1 integration enzyme not engineered to include the stabilization domain.

[0322] In some embodiments, the engineered integration enzyme is a BxB1 integration enzyme engineered to include a stabilization domain that increases the stability of the BxB1 as compared to an Bxb1 integration enzyme not engineered to include the stabilization domain.

[0323] In some embodiments, the engineered integration enzyme comprises an integration enzyme as described in International Patent Publication No. WO 2023/070031A2, which is hereby incorporated by reference in its entirety, where the integration enzyme is engineered to include a stabilization domain that increases the stability of the integration enzyme as compared to an integration enzyme not engineered to include the stabilization domain.

[0324] In some embodiments, the engineered integration enzyme comprises an amino acid sequence that is at least 80% (e.g., 80%, 85%, 90%, 91%, 92%, 93%, 94%, 95%, 96%, 97%, 99%, or 100%) identical to an amino acid sequence selected from SEQ ID NOs: 378-393 and a stabilization domain, where the stabilization domain increases the stability of the engineered integration enzyme as compared to an integration enzyme not engineered to include the stabilization domain.

[0325] In some embodiments, the engineered integration enzyme comprises an amino acid sequence that is at least 80% (e.g., 80%, 85%, 90%, 91%, 92%, 93%, 94%, 95%, 96%, 97%, 99%, or 100%) identical to an amino acid sequence of SEQ ID NO: 378 and a stabilization domain that increase the stability of the integration enzyme as compared to an integration enzyme not engineered to include a stabilization domain.

[0326] In some embodiments, the engineered integration enzyme comprises an amino acid sequence that is at least 80% (e.g., 80%, 85%, 90%, 91%, 92%, 93%, 94%, 95%, 96%, 97%, 99%, or 100%) identical to an amino acid sequence of SEQ ID NO: 379 and a stabilization domain, where the stabilization domain increase the stability of the integration enzyme as compared to an integration enzyme not engineered to include a stabilization domain.

[0327] In some embodiments, the engineered integration enzyme comprises an amino acid sequence that is at least 80% (e.g., 80%, 85%, 90%, 91%, 92%, 93%, 94%, 95%, 96%, 97%, 99%, or 100%) identical to an amino acid sequence of SEQ ID NO: 380 and a stabilization domain, where the stabilization domain increase the stability of the integration enzyme as compared to an integration enzyme not engineered to include a stabilization domain.

[0328] In some embodiments, the engineered integration enzyme comprises an amino acid sequence that is at least 80% (e.g., 80%, 85%, 90%, 91%, 92%, 93%, 94%, 95%, 96%, 97%, 99%, or 100%) identical to an amino acid sequence of SEQ ID NO: 381 and a stabilization domain, where the stabilization domain increase the stability of the integration enzyme as compared to an integration enzyme not engineered to include a stabilization domain.

[0329] In some embodiments, the engineered integration enzyme comprises an amino acid sequence that is at least 80% (e.g., 80%, 85%, 90%, 91%, 92%, 93%, 94%, 95%, 96%, 97%, 99%, or 100%) identical to an amino acid sequence of SEQ ID NO: 382 and a stabilization domain, where the stabilization domain increase the stability of the integration enzyme as compared to an integration enzyme not engineered to include a stabilization domain.

[0330] In some embodiments, the engineered integration enzyme comprises an amino acid sequence that is at least 80% (e.g., 80%, 85%, 90%, 91%, 92%, 93%, 94%, 95%, 96%, 97%, 99%, or 100%) identical to an amino acid sequence of SEQ ID NO: 383 and a stabilization domain, where the stabilization domain increase the stability of the integration enzyme as compared to an integration enzyme not engineered to include a stabilization domain.

[0331] In some embodiments, the engineered integration enzyme comprises an amino acid sequence that is at least 80% (e.g., 80%, 85%, 90%, 91%, 92%, 93%, 94%, 95%, 96%, 97%, 99%, or 100%) identical to an amino acid sequence of SEQ ID NO: 384 and a stabilization domain, where the stabilization domain increase the stability of the integration enzyme as compared to an integration enzyme not engineered to include a stabilization domain.

[0332] In some embodiments, the engineered integration enzyme comprises an amino acid sequence that is at least 80% (e.g., 80%, 85%, 90%, 91%, 92%, 93%, 94%, 95%, 96%, 97%, 99%, or 100%) identical to an amino acid sequence of SEQ ID NO: 385 and a stabilization domain, where the stabilization domain increase the stability of the integration enzyme as compared to an integration enzyme not engineered to include a stabilization domain.

[0333] In some embodiments, the engineered integration enzyme comprises an amino acid sequence that is at least 80% (e.g., 80%, 85%, 90%, 91%, 92%, 93%, 94%, 95%, 96%, 97%, 99%, or 100%) identical to an amino acid sequence of SEQ ID NO: 386 and a stabilization domain, where the stabilization domain increase the stability of the integration enzyme as compared to an integration enzyme not engineered to include a stabilization domain.

[0334] In some embodiments, the engineered integration enzyme comprises an amino acid sequence that is at least 80% (e.g., 80%, 85%, 90%, 91%, 92%, 93%, 94%, 95%, 96%, 97%, 99%, or 100%) identical to an amino acid sequence of SEQ ID NO: 387 and a stabilization domain, where the stabilization domain increase the stability of the integration enzyme as compared to an integration enzyme not engineered to include a stabilization domain.

[0335] In some embodiments, the engineered integration enzyme comprises an amino acid sequence that is at least 80% (e.g., 80%, 85%, 90%, 91%, 92%, 93%, 94%, 95%, 96%, 97%, 99%, or 100%) identical to an amino acid sequence of SEQ ID NO: 388 and a stabilization domain, where the stabilization domain increase the stability of the integration enzyme as compared to an integration enzyme not engineered to include a stabilization domain.

[0336] In some embodiments, the engineered integration enzyme comprises an amino acid sequence that is at least 80% (e.g., 80%, 85%, 90%, 91%, 92%, 93%, 94%, 95%, 96%, 97%, 99%, or 100%) identical to an amino acid sequence of SEQ ID NO: 389 and a stabilization domain, where the stabilization domain increase the stability of the integration enzyme as compared to an integration enzyme not engineered to include a stabilization domain.

[0337] In some embodiments, the engineered integration enzyme comprises an amino acid sequence that is at least 80% (e.g., 80%, 85%, 90%, 91%, 92%, 93%, 94%, 95%, 96%, 97%, 99%, or 100%) identical to an amino acid sequence of SEQ ID NO: 390 and a stabilization domain, where the stabilization domain increase the stability of the integration enzyme as compared to an integration enzyme not engineered to include a stabilization domain.

[0338] In some embodiments, the engineered integration enzyme comprises an amino acid sequence that is at least 80% (e.g., 80%, 85%, 90%, 91%, 92%, 93%, 94%, 95%, 96%, 97%, 99%, or 100%) identical to an amino acid sequence of SEQ ID NO: 391 and a stabilization domain, where the stabilization domain increase the stability of the integration enzyme as compared to an integration enzyme not engineered to include a stabilization domain.

[0339] In some embodiments, the engineered integration enzyme comprises an amino acid sequence that is at least 80% (e.g., 80%, 85%, 90%, 91%, 92%, 93%, 94%, 95%, 96%, 97%, 99%, or 100%) identical to an amino acid sequence of SEQ ID NO: 392 and a stabilization domain, where the stabilization domain increase the stability of the integration enzyme as compared to an integration enzyme not engineered to include a stabilization domain.

[0340] In some embodiments, the engineered integration enzyme comprises an amino acid sequence that is at least 80% (e.g., 80%, 85%, 90%, 91%, 92%, 93%, 94%, 95%, 96%, 97%, 99%, or 100%) identical to an amino acid sequence of SEQ ID NO: 393 and a stabilization domain, where the stabilization domain increase the stability of the integration enzyme as compared to an integration enzyme not engineered to include a stabilization domain.

### 6.9.2.1 Stabilization Domains

[0341] In one embodiment, an engineered integration enzyme (such as the eLSR described herein) comprises an integration enzyme or fragment thereof; and an at least first stabilization domain. In some embodiments, the engineered integration enzyme comprises an integration enzyme or a fragment thereof, a first stabilization domain, and a second stabilization domain. In some embodiments, the engineered integration enzyme comprises an integration enzyme or a fragment thereof, a first stabilization domain, a second stabilization domain, and a third stabilization domain.

[0342] In some embodiments, the stabilization domain is selected from a stabilon motif, an exin2l motif, or a combination thereof.

[0343] In some embodiments, the stabilization domain comprises a stabilon domain. The stabilon sequence originated from C-terminus of p54 protein (drosophila). The stabilon amino acid sequence is conserved across species. The stabilon domain can be 13 amino acids (e.g., KDKKSDGKDSQKK (SEQ ID NO: 584) (Drosophila melanogaster)) or 15 amino acids (e.g., KDKDKKSDGKDSQKK (SEQ ID NO: 583)). In some embodiments, the stabilization domain comprises an amino acid sequence that is at least 80% (e.g., 80%, 85%, 90%, 91%, 92%, 93%, 94%, 95%, 96%, 97%, 99%, or 100%) identical to an amino acid sequence of KDKKSDGKDSQKK (SEQ ID NO: 584). In some embodiments, the stabilization domain comprises an amino acid sequence that is at least 80% (e.g., 80%, 85%, 90%, 91%, 92%, 93%, 94%, 95%, 96%, 97%, 99%, or 100%) identical to an amino acid sequence of KDKDKKSDGKDSQKK.

[0344] In some embodiments, the stabilization domain comprises a Exin21 domain. In some embodiments, the stabilization domain comprises an amino acid sequence of QPRFAAA (SEQ ID NO: 585). In some embodiments, the stabilization domain comprises an amino acid sequence having one, two, three, four or five or more amino acid substitutions in SEQ ID NO: 585. In some embodiments, the stabilization domain is encoded by a polynucleotide sequence having a nucleic acid sequence that is at least 80% (e.g., 80%, 85%, 90%, 91%, 92%, 93%, 94%, 95%, 96%, 97%, 99%, or 100%) identical to CAACCGCGGTTCGCGGCCGCT (SEQ ID NO: 586).

[0345] In some embodiments, the engineered integration enzymes comprises an integration enzyme comprising an amino acid sequence that is at least 80% (e.g., 80%, 85%, 90%, 91%, 92%, 93%, 94%, 95%, 96%, 97%, 99%, or 100%) identical to an amino acid sequence of SEQ ID NO: 388 and a stabilization domain that comprises an amino acid sequence that is at least 80% (e.g., 80%, 85%, 90%, 91%, 92%, 93%, 94%, 95%, 96%, 97%, 99%, or 100%) identical to an amino acid sequence of KDKDKKSDGKDSQKK (SEQ ID NO: 583) or an amino acid sequence having one, two, three, four or five or more amino acid substitutions in SEQ ID NO: 584.

[0346] In some embodiments, the engineered integration enzymes comprises an integration enzyme comprising an amino acid sequence that is at least 80% (e.g., 80%, 85%, 90%, 91%, 92%, 93%, 94%, 95%, 96%, 97%, 99%, or 100%) identical to an amino acid sequence of SEQ ID NO: 388 and a stabilization domain comprising an amino acid sequence of QPRFAAA (SEQ ID NO: 585) or an amino acid sequence having one, two, three, four or five or more amino acid substitutions in SEQ ID NO: 585.

[0347] In some embodiments, the stabilization domain is positioned relative to the integration enzyme (e.g., N-terminus, C-terminus, or in an internal position) such that when expressed/present in a cell, the stabilization domain increase stability of the integration enzyme (e.g., increase stability when compared to an integration enzyme not engineered to include the domain). In embodiments where the stabilization domain is placed in an internal position in the integration enzyme, the position in the integration enzyme is selected strategically placed such that it confers increased stability without compromising the integration enzyme's native function. For example, by positioning the stabilization domain internally, interference with the protein's natural structure and function can be avoided while still gaining the benefits of the stabilization domain.

[0348] In some embodiments, an engineered integration enzyme comprises an integration enzyme or a fragment thereof and a first stabilization domain, and optionally a second stabilization domain.

[0349] In some embodiments, the first stabilization domain and/or second stabilization domain are positioned in the engineered integration enzyme such that the engineered integration enzyme and the first and/or second stabilization domains are an in-frame fusion.

[0350] In some embodiments, the first stabilization domain and/or second stabilization domain are located N-terminus to the integration enzyme or fragment thereof, C-terminus to the integration enzyme of fragment thereof, or between two consecutive amino acid residues in the amino acid sequence of the integration enzyme or fragment thereof (also referred to as “internal”).

[0351] In some embodiments, the first stabilization domain and/or second stabilization domain are located N-terminus to the integration enzyme or fragment thereof.

[0352] In some embodiments, the first stabilization domain and/or second stabilization domain are located C-terminus to the integration enzyme or fragment thereof.

[0353] In some embodiments, the first stabilization domain and/or second stabilization domain are located between two consecutive amino acid residues in the amino acid sequence of the integration enzyme or fragment thereof.

[0354] In some embodiments, the two consecutive amino acid residues in the amino acid sequence of the integration enzyme are located in a N-terminal catalytic domain; a recombinase domain, or one or more zinc ribbon domain.

[0355] In some embodiments, the two consecutive amino acid residues in the amino acid sequence of the integration enzyme correspond amino acid residues between the N-terminal catalytic domain and the recombinase domain or between the recombinase domain and one of the zinc ribbon domains.

[0356] In some embodiments, the engineered integration enzyme comprises an orientation from N-terminus to C-terminus: N-I-S; I-S-N; S-I-N; N-S-I; N-X₁-I-S; I-X₁-S-N; S-X₁-I-N; N-X₁-S-I; N-I-X₁-S; I-S-X₁-N; S-I-X₁-N; N-S-X₁-I; N-X₁-I-X₂-S; I-X₁-S-X₂-N; S-X₁-I-X₂-N; and N-X₁-S-X₂-I; wherein I is the integration enzyme or fragment thereof, X₁ is a first linker, S is the stabilization domain, X₂ is a second linker, and N is the NLS.

### 6.9.3. Engineered Integration Enzymes with a Modification that Increase Stabilization

[0357] This disclosure features an integration enzyme (such as the eLSR described herein) where the amino acid sequence of the integration is modified such that the integration is more stable than an integration enzyme not comprising a modification in the amino acid sequence.

[0358] In one embodiment, an engineered integration enzyme comprises: an integration enzyme or fragment thereof comprising at least a first amino acid modification that increases the stability of the integration enzyme as compared to the integration enzyme not comprising the at least first amino acid modification. In some embodiments, the engineered integration enzyme comprises a nuclear localization signal (NLS), where the NLS is positioned in the engineered integration enzyme such that it directs the engineered integration enzyme to the nucleus.

[0359] In some embodiments, the engineered integration enzyme comprises an integration enzyme or fragment thereof comprising at least two (e.g., at least three, at least four, at least five, at least six, at least seven, at least eight, at least nine, or at least ten) amino acid modification such that the combination of the at least two modifications increase the stability of the integration enzyme as compared to the integration enzyme not comprising the at least first amino acid modification.

[0360] In some embodiments, the amino acid modification can be in a degron motif in the integration enzyme. In some embodiments, the amino acid modification can be a substitution, deletion, or insertion that increases the stability of the integration enzyme as compared to an integration enzyme not comprising the at least first amino acid modification.

[0361] In some embodiments, the amino acid modification can be a substitution, deletion, or insertion in a degron motif in the integration enzyme. Computational prediction for BxB1 showed the existence of two degron domains and several lysine residues (FIG. 36A).

[0362] In some embodiments, the engineered integration enzyme is an integration enzyme described in Table 10 and comprises an amino acid modification that increases the stability of the integration enzyme as compared to an integration enzyme selected from Table 10 and not engineered to include the amino acid modification.

[0363] In some embodiments, the amino acid modification can be a substitution, deletion, or insertion in a BxB1 integration enzyme that increases the stability of the BxB1 as compared to an Bxb1 integration enzyme that does not comprise the at least first amino acid modification.

[0364] In some embodiments, the amino acid modification can be a substitution, deletion, or insertion in an integration enzyme having an amino acid sequence of SEQ ID NO: 388 that increases the stability of the integration enzyme as compared to an integration enzyme having a sequence of SEQ ID NO: 388 that does not comprise the at least first amino acid modification.

[0365] In one embodiment, the first amino acid modification is an amino acid substitution of L275V in SEQ ID NO: 388.

[0366] In some embodiments, the engineered integration enzyme comprises an integration enzyme as described in International Patent Publication No. WO 2023/070031A2, which is hereby incorporated by reference in its entirety, where the integration enzyme includes an amino acid modification that increases the stability of the integration enzyme as compared to an integration enzyme not engineered to have the amino acid modification.

[0367] In some embodiments, the engineered integration enzyme comprises an amino acid sequence that is at least 80% (e.g., 80%, 85%, 90%, 91%, 92%, 93%, 94%, 95%, 96%, 97%, 99%, or 100%) identical to an amino acid sequence selected from SEQ ID NOs: 378-393 and an amino acid modification in the amino acid sequence where the modification increases the stability of the engineered integration enzyme as compared to an integration enzyme not engineered to have the at least first amino acid modification.

[0368] In some embodiments, the engineered integration enzyme comprises an amino acid sequence that is at least 80% (e.g., 80%, 85%, 90%, 91%, 92%, 93%, 94%, 95%, 96%, 97%, 99%, or 100%) identical to an amino acid sequence of SEQ ID NO: 378 and an amino acid modification in the sequence of SEQ ID NO: 378, where the amino acid modification increases the stability of the integration enzyme as compared to an integration enzyme having an amino acid sequence selected of SEQ ID NO: 378.

[0369] In some embodiments, the engineered integration enzyme comprises an amino acid sequence that is at least 80% (e.g., 80%, 85%, 90%, 91%, 92%, 93%, 94%, 95%, 96%, 97%, 99%, or 100%) identical to an amino acid sequence of SEQ ID NO: 379 and an amino acid modification in the sequence of SEQ ID NO: 379, where the amino acid modification increases the stability of the integration enzyme as compared to an integration enzyme having an amino acid sequence selected of SEQ ID NO: 379.

[0370] In some embodiments, the engineered integration enzyme comprises an amino acid sequence that is at least 80% (e.g., 80%, 85%, 90%, 91%, 92%, 93%, 94%, 95%, 96%, 97%, 99%, or 100%) identical to an amino acid sequence of SEQ ID NO: 380 and an amino acid modification in the sequence of SEQ ID NO: 380, where the amino acid modification increases the stability of the integration enzyme as compared to an integration enzyme having an amino acid sequence selected of SEQ ID NO: 381.

[0371] In some embodiments, the engineered integration enzyme comprises an amino acid sequence that is at least 80% (e.g., 80%, 85%, 90%, 91%, 92%, 93%, 94%, 95%, 96%, 97%, 99%, or 100%) identical to an amino acid sequence of SEQ ID NO: 381 and an amino acid modification in the sequence of SEQ ID NO: 381, where the amino acid modification increases the stability of the integration enzyme as compared to an integration enzyme having an amino acid sequence selected of SEQ ID NO: 381.

[0372] In some embodiments, the engineered integration enzyme comprises an amino acid sequence that is at least 80% (e.g., 80%, 85%, 90%, 91%, 92%, 93%, 94%, 95%, 96%, 97%, 99%, or 100%) identical to an amino acid sequence of SEQ ID NO: 382 and an amino acid modification in the sequence of SEQ ID NO: 382, where the amino acid modification increases the stability of the integration enzyme as compared to an integration enzyme having an amino acid sequence selected of SEQ ID NO: 382.

[0373] In some embodiments, the engineered integration enzyme comprises an amino acid sequence that is at least 80% (e.g., 80%, 85%, 90%, 91%, 92%, 93%, 94%, 95%, 96%, 97%, 99%, or 100%) identical to an amino acid sequence of SEQ ID NO: 383 and an amino acid modification in the sequence of SEQ ID NO: 383, where the amino acid modification increases the stability of the integration enzyme as compared to an integration enzyme having an amino acid sequence selected of SEQ ID NO: 383.

[0374] In some embodiments, the engineered integration enzyme comprises an amino acid sequence that is at least 80% (e.g., 80%, 85%, 90%, 91%, 92%, 93%, 94%, 95%, 96%, 97%, 99%, or 100%) identical to an amino acid sequence of SEQ ID NO: 384 and an amino acid modification in the sequence of SEQ ID NO: 384, where the amino acid modification increases the stability of the integration enzyme as compared to an integration enzyme having an amino acid sequence selected of SEQ ID NO: 384.

[0375] In some embodiments, the engineered integration enzyme comprises an amino acid sequence that is at least 80% (e.g., 80%, 85%, 90%, 91%, 92%, 93%, 94%, 95%, 96%, 97%, 99%, or 100%) identical to an amino acid sequence of SEQ ID NO: 385 and an amino acid modification in the sequence of SEQ ID NO: 385, where the amino acid modification increases the stability of the integration enzyme as compared to an integration enzyme having an amino acid sequence selected of SEQ ID NO: 385.

[0376] In some embodiments, the engineered integration enzyme comprises an amino acid sequence that is at least 80% (e.g., 80%, 85%, 90%, 91%, 92%, 93%, 94%, 95%, 96%, 97%, 99%, or 100%) identical to an amino acid sequence of SEQ ID NO: 386 and an amino acid modification in the sequence of SEQ ID NO: 386, where the amino acid modification increases the stability of the integration enzyme as compared to an integration enzyme having an amino acid sequence selected of SEQ ID NO: 386.

[0377] In some embodiments, the engineered integration enzyme comprises an amino acid sequence that is at least 80% (e.g., 80%, 85%, 90%, 91%, 92%, 93%, 94%, 95%, 96%, 97%, 99%, or 100%) identical to an amino acid sequence of SEQ ID NO: 387 and an amino acid modification in the sequence of SEQ ID NO: 387, where the amino acid modification increases the stability of the integration enzyme as compared to an integration enzyme having an amino acid sequence selected of SEQ ID NO: 387.

[0378] In some embodiments, the engineered integration enzyme comprises an amino acid sequence that is at least 80% (e.g., 80%, 85%, 90%, 91%, 92%, 93%, 94%, 95%, 96%, 97%, 99%, or 100%) identical to an amino acid sequence of SEQ ID NO: 388 and an amino acid modification in the sequence of SEQ ID NO: 388, where the amino acid modification increases the stability of the integration enzyme as compared to an integration enzyme having an amino acid sequence selected of SEQ ID NO: 388.

[0379] In some embodiments, the engineered integration enzyme comprises an amino acid sequence that is at least 80% (e.g., 80%, 85%, 90%, 91%, 92%, 93%, 94%, 95%, 96%, 97%, 99%, or 100%) identical to an amino acid sequence of SEQ ID NO: 389 and an amino acid modification in the sequence of SEQ ID NO: 389, where the amino acid modification increases the stability of the integration enzyme as compared to an integration enzyme having an amino acid sequence selected of SEQ ID NO: 389.

[0380] In some embodiments, the engineered integration enzyme comprises an amino acid sequence that is at least 80% (e.g., 80%, 85%, 90%, 91%, 92%, 93%, 94%, 95%, 96%, 97%, 99%, or 100%) identical to an amino acid sequence of SEQ ID NO: 390 and an amino acid modification in the sequence of SEQ ID NO: 390, where the amino acid modification increases the stability of the integration enzyme as compared to an integration enzyme having an amino acid sequence selected of SEQ ID NO: 390.

[0381] In some embodiments, the engineered integration enzyme comprises an amino acid sequence that is at least 80% (e.g., 80%, 85%, 90%, 91%, 92%, 93%, 94%, 95%, 96%, 97%, 99%, or 100%) identical to an amino acid sequence of SEQ ID NO: 391 and an amino acid modification in the sequence of SEQ ID NO: 391, where the amino acid modification increases the stability of the integration enzyme as compared to an integration enzyme having an amino acid sequence selected of SEQ ID NO: 391.

[0382] In some embodiments, the engineered integration enzyme comprises an amino acid sequence that is at least 80% (e.g., 80%, 85%, 90%, 91%, 92%, 93%, 94%, 95%, 96%, 97%, 99%, or 100%) identical to an amino acid sequence of SEQ ID NO: 392 and an amino acid modification in the sequence of SEQ ID NO: 392, where the amino acid modification increases the stability of the integration enzyme as compared to an integration enzyme having an amino acid sequence selected of SEQ ID NO: 392.

[0383] In some embodiments, the engineered integration enzyme comprises an amino acid sequence that is at least 80% (e.g., 80%, 85%, 90%, 91%, 92%, 93%, 94%, 95%, 96%, 97%, 99%, or 100%) identical to an amino acid sequence of SEQ ID NO: 393 and an amino acid modification in the sequence of SEQ ID NO: 393, where the amino acid modification increases the stability of the integration enzyme as compared to an integration enzyme having an amino acid sequence selected of SEQ ID NO: 393.

### 6.9.4. Engineered Integration Enzymes with a Combination of a Stabilization Domain and a Modification that Increases Stabilization

[0384] This disclosure also features engineered integration enzymes (such as the eLSR described herein) comprising a stabilization domain and an amino acid modification that increases the engineered integration enzymes stability.

[0385] In some embodiments, the engineered integration enzyme comprises an integration enzyme as described in International Patent Publication No. WO 2023/070031A2, which is hereby incorporated by reference in its entirety, where the integration enzyme includes a stabilization domain and an amino acid modification, where the stabilization domain, the amino acid modification, or both, increase the stability of the integration enzyme as compared to an integration enzyme not engineered to have the amino acid modification and/or the stabilization domain.

[0386] In some embodiments, the engineered integration enzyme is an integration enzyme described in Table 10 and comprises a stabilization domain and an amino acid modification in the same integration enzyme selected from Table 10, wherein the stabilization domain, the amino acid modification, or both, increase the stability of the integration enzyme as compared to an integration enzyme not engineered to have the amino acid modification and/or stabilization domain.

[0387] In some embodiments, the engineered integration enzyme is a BxB1 integration enzyme comprising a stabilization domain and an amino acid modification in the BxBT integration enzyme, wherein the stabilization domain, the amino acid modification, or both, increase the stability integration enzyme as compared to an integration enzyme not engineered to have the amino acid modification and/or stabilization domain.

[0388] In some embodiments, the engineered integration enzyme comprises an amino acid sequence that is at least 80% (e.g., 80%, 85%, 90%, 91%, 92%, 93%, 94%, 95%, 96%, 97%, 99%, or 100%) identical to an amino acid sequence selected from SEQ ID NOs: 378-393, a stabilization domain, and an amino acid modification in the amino acid sequence, where the stabilization domain, the amino acid modification, or both, increase the stability of the engineered integration enzyme as compared to an integration enzyme not engineered to have the at amino acid modification and/or the stabilization domain. In some embodiments, the engineered integration enzyme comprises an amino acid sequence that is at least 80% (e.g., 80%, 85%, 90%, 91%, 92%, 93%, 94%, 95%, 96%, 97%, 99%, or 100%) identical to an amino acid sequence of SEQ ID NO: 388, a stabilization domain and an amino acid modification in SEQ ID NO: 388, wherein the stabilization domain, the amino acid modification, or both, increase the stability of integration enzyme as compared to an integration enzyme not engineered to have the amino acid modification and/or stabilization domain.

### 6.9.5. Engineered mRNA Encoding an Integration Enzyme

[0389] This disclosure features a polynucleotide comprising a nucleic acid sequence encoding any of the engineered integration enzymes described herein (see Section 4.9.1, 4.9.2, 4.9.3, and 4.9.4) or any of the engineered integration enzyme linked to the gene editor polypeptide or fusion proteins described herein (see Section 4.9.6).

[0390] In some embodiments, the nucleic acid sequence encoding the engineered integration enzyme is codon optimized. In some embodiments, the codon optimization is performed using an algorithm.

[0391] In some embodiments, the nucleic acid sequence of the engineered integration enzyme is optimized based on second structure such that the structure confers increased stability of the polynucleotide. In some embodiments, the optimization based on second structure relies on an algorithm to determine the optimal mRNA sequence.

[0392] A non-limiting example of an algorithm capable of being used to optimize the mRNA encoding any of the any of the engineered integration enzymes described herein (see Section 4.9.1, 4.9.2, and 4.9.3) is as described in Zhang et al. (Algorithm for Optimized mRNA Design Improves Stability and Immunogenicity, Nature 2023, doi.org/10.1038/s41586-023-06127-z), which is hereby incorporated by reference in its entirety. Zhang et al. refer to an algorithm called LinearDesign that optimizes both structural stability (via secondary structure) and codon usage.

[0393] In some embodiments, the nucleic acid sequence of the engineered integration enzyme is optimized based on the LinearDesign algorithm.

[0394] This disclosure also features vector comprising the nucleic acid sequence encoding any of the engineered integration enzymes described herein (see Section 4.9.1, 4.9.2, and 4.9.3) or any of the engineered integration enzyme linked to the gene editor polypeptide or fusion proteins described herein (see Section 4.9.5).

[0395] Other non-limiting examples of increasing the stability of an mRNA include: using novel UTR's or codons that increase the longevity of the mRNA or circular mRNA.

### 6.9.6. Engineered Integration Enzymes Fused to a Gene Editor Polypeptide

[0396] This disclosure also features engineered integration enzymes (e.g., any of the engineered integration enzymes described herein (see, e.g., Section 4.9.1, 4.9.2, 4.9.3, and 4.9.4) linked to a gene editor polypeptide (e.g., any of the gene editor polypeptides described herein). In such cases, the linked engineered integration enzyme-gene editor polypeptide can be used to incorporate an integration recognition site into the genome of a cell and for integrating a donor polynucleotide template into the genome.

[0397] In some embodiments, the C-terminus of the engineered integration enzyme is linked to the gene editor polypeptide.

[0398] In some embodiments, the C-terminus of the gene editor polypeptide is linked to the engineered integration enzymes.

[0399] In some embodiments, the engineered integration enzyme is linked to the gene editor polypeptide by in-frame fusion.

[0400] In some embodiments, the engineered integration enzyme is linked to the gene editor polypeptide by a linker.

[0401] In some embodiments, the linker is a peptide fused in-frame between the engineered integration enzyme and the gene editor polypeptide.

[0402] In some embodiments, the one or more linkers is selected from: Table 3.

[0403] In some embodiments, the gene editor polypeptide comprises a DNA binding domain and a reverse transcriptase.

[0404] This disclosure also features a fusion protein comprising (a) a DNA binding domain, optionally comprising a nickase activity; (b) a reverse transcriptase; and (c) any of the engineered integration enzymes described herein (see, e.g., Sections 4.9.1, 4.9.2, 4.9.3, and 4.9.4), wherein at least any two of elements (a), (b), or (c) are linked via at least a first C-terminal linker comprising. In some embodiments, the fusion protein comprises from N-terminus to C-terminus: (a), (b), and (c); (b), (a), and (c); (c), (a), and (b); (c), (b), and (a); (b), (c), and (a); and (b), (a), and (c).

[0405] In some embodiments, the engineered integration enzyme is linked to a gene editor is described in FIG. 46.

### 6.9.7. Measuring Stability

[0406] Non-limiting examples of metrics that can be used as indication of protein stability include the following.

[0407] Protein Half-Life: This is the time required for half of the amount of protein in a cell to be degraded. This can be used to measure protein turnover. One non-limiting example of measuring protein half-life includes using pulse-chase experiments where the protein is labeled with a radioactive or other traceable isotope, then followed over time to see how rapidly it disappears.

[0408] Melting Temperature (Tm): This is a measure of a protein's thermal stability. It is the temperature at which half of the protein population is unfolded or denatured. It can be determined through a variety of methods, for example, without limitation, differential scanning calorimetry (DSC), circular dichroism (CD), or fluorescence-based thermal shift assays.

[0409] Thermodynamic Stability (AG): This is the change in Gibbs free energy between the folded and unfolded state of the protein. It measures how much energy is required to unfold the protein, with a larger value indicating a more stable protein. Non-limiting examples of measuring thermodynamic stability include equilibrium denaturation experiments, where the protein is exposed to varying concentrations of a denaturant and the degree of unfolding is monitored.

[0410] Protein Degradation Rate: This method measures how quickly a protein is degraded in a cell. It can be quantified using a variety of methods, for example, without limitation: western blot analysis (with or without the use of protease inhibitors) to assess protein levels over time.

[0411] Resistance to Chemical Denaturation: The concentration of denaturing agent (e.g., urea or guanidinium chloride) needed to unfold a protein can provide a measure of the proteins stability.

### 6.9.8. Systems Comprising an Engineered Integration Enzyme

[0412] This disclosure features a system for site-specifically integrating a donor polynucleotide template into a mammalian cell genome at a target DNA sequence, comprising: an attachment site containing gRNA (atgRNA) comprising at least a portion of an at least first integration recognition site; a gene editor polypeptide comprising a DNA binding nickase domain linked to a reverse transcriptase domain capable of incorporating the integration recognition site into the target DNA sequence, any of the engineered integration enzymes described herein (e.g., an engineered integration enzyme comprising an integration enzyme with a Hifi mutation (see Section 4.9.1) and optionally a stabilization domain (see Section 4.9.2) or an engineered integration enzyme comprising an integration enzyme comprising an amino acid modification that increases stability (see Section 4.9.3)); a donor polynucleotide template linked to a sequence that is an integration cognate of the integration recognition site present in the atgRNA, whereby the gene editor polypeptide site-specifically integrates the integration recognition site into the target DNA sequence, whereby the engineered integration enzyme integrates the donor polynucleotide template into the target DNA sequence.

[0413] In some embodiments of the system comprising an engineered integration enzyme (such as an eLSR described herein), the first atgRNA comprises: (i) a domain that is capable of guiding the gene editor polypeptide to the target DNA sequence; and (ii) a reverse transcriptase (RT) template that comprises at least a portion of an at least first integration recognition site, whereby the at least portion of the at least first integration recognition site is integrated into the genome of the cell at the target sequence.

[0414] In some embodiments of the system comprising an engineered integration enzyme, the system also includes a second atgRNA.

[0415] In some embodiments of the system comprising an engineered integration enzyme, the first atgRNA and the second atgRNA are an at least first pair of atgRNAs, wherein the at least first pair of atgRNAs have domains that are capable of guiding the gene editor polypeptide to the target DNA sequence; the first atgRNA further includes a first RT template that comprises at least a portion of an at least first integration recognition site; the second atgRNA further includes a second RT template that comprises at least a portion of the first integration recognition site, and the first atgRNA and the second atgRNAs collectively encode the entirety of the first integration recognition site, whereby the least first integration recognition site is integrated into the genome of the cell at the target sequence.

[0416] In some embodiments of the system comprising an engineered integration enzyme, upon introducing the system into the cell, the engineered integration enzyme enhances integration efficiency of the donor polynucleotide template at the site-specifically integrated integration recognition site as compared to the integration efficiency of a system using a non-engineered integration enzyme to integrate donor polynucleotide template at the site-specifically integrated integration recognition site.

### 6.9.9. Method of Using an Engineered Integration Enzyme

[0417] This disclosure also features a method for site-specifically integrating a donor polynucleotide template into a mammalian cell genome at a target DNA sequence, comprising: incorporating an integration recognition site into the genome by delivering into the cell: an attachment site containing guide RNA (atgRNA) comprising at least a portion of an at least first integration recognition site; and a gene editor polypeptide or polynucleotide encoding a gene editor polypeptide, wherein the gene editor polypeptide comprises a DNA binding nickase domain linked to a reverse transcriptase domain and is capable of incorporating the integration recognition site into the target DNA sequence; and optionally, a nicking gRNA; and integrating the donor polynucleotide template into the genome by delivering into the cell: any of the engineered integration enzymes described herein (e.g., an engineered integration enzyme comprising an integration enzyme and a Hifi mutation (see section 4.9.1) and optionally a stabilization domain (see Section 4.9.2) or an engineered integration enzyme comprising an integration enzyme comprising an amino acid modification that increases stability (see Section 4.9.3)); and a donor polynucleotide template, wherein the donor polynucleotide template is linked to a sequence that is an integration cognate of the integration recognition site present in the atgRNA, and wherein the donor polynucleotide template is integrated into the genome at the incorporated genomic integration recognition site by the integration enzyme.

[0418] In some embodiments of the method using the engineered integration enzyme, the first atgRNA comprises: (i) a domain that is capable of guiding the gene editor polypeptide to the target DNAsequence; and (ii) a reverse transcriptase (RT) template that comprises at least a portion of an at least first integration recognition site, whereby the at least portion of the at least first integration recognition site is integrated into the genome of the cell at the target sequence.

[0419] In some embodiments of the method using the engineered integration enzyme, the method also includes a second atgRNA.

[0420] In some embodiments of the method using the engineered integration enzyme, the first atgRNA and the second atgRNA are an at least first pair of atgRNAs, wherein the at least first pair of atgRNAs have domains that are capable of guiding the gene editor polypeptide to the target DNA sequence; the first atgRNA further includes a first RT template that comprises at least a portion of an at least first integration recognition site; the second atgRNA further includes a second RT template that comprises at least a portion of the first integration recognition site, and the first atgRNA and the second atgRNAs collectively encode the entirety of the first integration recognition site, whereby the least first integration recognition site is integrated into the genome of the cell at the target sequence.

[0421] In some embodiments of the method using the engineered integration enzyme, the method enhances integration efficiency of the donor polynucleotide template at the site-specifically integrated integration recognition stie at the double-stranded target DNA sequence as compared to the integration efficiency of the donor polynucleotide template at the site-specifically integrated recognition site when using a method that does not comprise the engineered integration enzyme.

### 6.10. Co-Delivery of Gene Editor and Donor DNA Template

[0422] This disclosure features methods of delivering (e.g., co-delivery or dual delivery) a system capable of site-specifically integrating a template polynucleotide into the genome of a cell, where the methods include delivering to a (i) gene editor construct and a (ii) template polynucleotide, and (iii) at least a first attachment site-containing guide (atgRNA).

[0423] This disclosure also features a method for delivering a system capable of site-specifically integrating a template polynucleotide into the genome of a cell, where the method includes: delivering a lipid nanoparticle (LNP) comprising a gene editor polynucleotide (e.g., a gene editor polynucleotide construct) and a vector comprising a template polynucleotide and at least a first attachment site-containing guide RNA (atgRNA). In some embodiments, the first atgRNA comprises (i) a domain that is capable of guiding the prime editor system to a target sequence; and (ii) a reverse transcriptase (RT) template that comprises at least a portion of a first integration recognition site. In some embodiments, where the vector comprises a polynucleotide encoding a first atgRNA, the RT template comprises the entirety of the first integration recognition site. In some embodiments, where the vector comprises a polynucleotide encoding a first atgRNA, the vector also includes a sequence encoding a nicking guide RNA (ngRNA).

[0424] This disclosure also features a method for delivering a system capable of site-specifically integrating a template polynucleotide into the genome of a cell, where the method includes: delivering a lipid nanoparticle (LNP) comprising a gene editor polynucleotide (e.g., a gene editor polynucleotide construct) and a vector comprising a template polynucleotide and a first attachment site-containing guide RNA (atgRNA) and a second attachment site-containing guide RNA (atgRNA). In some embodiments, the first atgRNA and the second atgRNA are an at least first pair of atgRNAs, wherein the at least first pair of atgRNAs have domains that are capable of guiding the prime editor system to a target sequence, the first atgRNA further includes a first RT template that comprises at least a portion of the at least first integration recognition site; and the second atgRNA further includes a second RT template that comprises at least a portion of the first integration recognition site, and the first atgRNA and the second atgRNAs collectively encode the entirety of the first integration recognition site. In such embodiments, the first atgRNA and second atgRNA include at least a 6 bp overlap (e.g., 6 bp of complementarity).

[0425] This disclosure also features a method for delivering a system capable of site-specifically integrating a template polynucleotide into the genome of a cell, where the method includes: delivering into a cell a lipid nanoparticle (LNP) comprising: (i) a gene editor polynucleotide (e.g., a gene editor polynucleotide construct), and (ii) a first attachment site-containing guide RNA (atgRNA); and a vector comprising: (i) a template polynucleotide, and (ii) a second atgRNA. In some embodiments, the first atgRNA and the second atgRNA are an at least first pair of atgRNAs, wherein the at least first pair of atgRNAs have domains that are capable of guiding the prime editor system to a target sequence, the first atgRNA further includes a first RT template that comprises at least a portion of the a first integration recognition site; and the second atgRNA further includes a second RT template that comprises at least a portion of the first integration recognition site, and the first atgRNA and the second atgRNAs collectively encode the entirety of the first integration recognition site. In such embodiments, the first atgRNA and second atgRNA include at least a 6 bp overlap (e.g., 6 bp of complementarity).

[0426] This disclosure also features a method for delivering a system capable of site-specifically integrating a template polynucleotide into the genome of a cell, where the method includes delivering: a lipid nanoparticle (LNP) comprising: (i) a gene editor polynucleotide (e.g., a gene editor polynucleotide construct), (ii) a first attachment site-containing guide RNA (atgRNA), and (iii) a second atgRNA; and a vector comprising (i) a template polynucleotide. In some embodiments, the first atgRNA and the second atgRNA are an at least first pair of atgRNAs, wherein the at least first pair of atgRNAs have domains that are capable of guiding the prime editor system to a target sequence, the first atgRNA further includes a first RT template that comprises at least a portion of the at least first integration recognition site; and the second atgRNA further includes a second RT template that comprises at least a portion of the at least first integration recognition site, and the first atgRNA and the second atgRNAs collectively encode the entirety of the first integration recognition site. In such embodiments, the first atgRNA and second atgRNA include at least a 6 bp overlap (e.g., 6 bp of complementarity).

[0427] This disclosure also features a method for delivering a system capable of site-specifically integrating a template polynucleotide into the genome of a cell, where the method includes delivering: a lipid nanoparticle (LNP) comprising: (i) a gene editor polynucleotide (e.g., a gene editor polynucleotide construct) and (ii) a first attachment site-containing guide RNA (atgRNA); and a vector comprising: (i) a template polynucleotide, and (ii) a nicking atgRNA. In some embodiments, the first atgRNA comprises (i) a domain that is capable of guiding the prime editor system to a target sequence; and (ii) a reverse transcriptase (RT) template that comprises at least a portion of a first integration recognition site. In some embodiments, where the vector comprises a polynucleotide encoding a first atgRNA, the RT template comprises the entirety of the first integration recognition site.

[0428] In some embodiments, where the method includes delivering an LNP and a first vector, the LNP and the first vector are delivered at least 1 day, at least 2 days, at least 3 days, at least 4 days, at least 5 days, at least 6 days, at least 7 days, at least 2 weeks, at least 3 weeks, at least 4 weeks, at least 5 weeks, at least 6 weeks, at least 7 weeks, or at least 8 weeks apart. In some embodiments, where the method includes delivering an LNP and a second vector, the LNP and the second vector are delivered a different times on the same day, at least 1 day, at least 2 days, at least 3 days, at least 4 days, at least 5 days, at least 6 days, at least 7 days, at least 2 weeks, at least 3 weeks, at least 4 weeks, at least 5 weeks, at least 6 weeks, at least 7 weeks, or 8 weeks apart. In some embodiments, the LNP and the first vector are delivered about 6 weeks apart.

[0429] This disclosure also features a method for delivering a system capable of site-specifically integrating a template polynucleotide into the genome of a cell, where the method includes delivering the system in vivo. In a non-limiting example, the system is delivered to a fetus or a neonate to site-specifically integrate in vivo a template polynucleotide into the genome of a cell. Delivering the system to a fetus or a neonate provides advantages over delivering the system later in life (e.g., after the neonate phase ends), including: (i) fewer number of cells that need to be treated (e.g., in the adult, there are trillions of cells, but in a fetus, there are significantly fewer cells); (ii) developmental benefits: the early stage of development of a fetus or a neonate means that if a genetic disease is treated successfully, the individual could potentially develop normally, with significant reduction or even complete removal of any of the disease manifestations; (iii) preventing disease progression: in certain genetic conditions the physiological damage is irreversible damage and in some instances is exacerbated as the disease progresses, therefore, intervening at the fetal (or neonate) stage, it is possible to prevent or reduce the progression of the disease and potentially prevent any irreversible damage from occurring; (iv) higher cell turnover and cell division rate: in a developing fetus, cells are dividing rapidly as the fetus (or neonate) grows, which means that if programmable gene insertion is achieved in the fetus (or neonate) is introduced, it could be propagated more rapidly throughout the body than in an older child or adult; and (v) immune tolerance: for example, there is evidence to suggest that performing gene therapy (e.g., programmable gene insertion) early in development might result in immune tolerance to the vector, thereby reducing the risk of an immune response against the system.

[0430] In some embodiments, the method includes delivering an LNP and a first vector, the LNP and the first vector are delivered to a cell in vivo. In some embodiments, the in vivo cells are present in a fetus or a neonate. In some embodiments, the LNP is delivered between age 0 (day of birth) and age 7 days and the vector is delivered between age 5 weeks and age 7 weeks. In some embodiments, the LNP is delivered at about at 2 days and the vector is delivered at about age 6 weeks.

[0431] In some embodiments, where the method includes delivering an LNP and a first vector, the LNP and the first vector are delivered to a cell in vivo, the LNP can be delivered to a fetus at a first time point and the vector is delivered to the fetus after the fetus is born (referred to after birth as a neonate). In some embodiments, the LNP is delivered to a fetus and the vector is delivered to the fetus after birth (i.e., at the neonate stage) at any point between birth and up to age 8 weeks. In some embodiments, the LNP is delivered to the fetus and the vector is delivered at about age 1 week, 2 weeks, 3 weeks, 4 weeks, 5 weeks, 6 weeks, 7 weeks or 8 weeks.

[0432] In some embodiments, where the method includes delivering an LNP and a first vector, the LNP and the first vector are delivered to a cell in vivo, the LNP can be delivered to a fetus at a first time point and the vector is delivered to the fetus (child) after the fetus (child) is born, for example, when the child is age 90 days or older (e.g., age 6 months, age 9 months, age 1 year, age 2 years, age 3 years, age 4 years, age 5 years, age 6 years, or older).

[0433] As used herein, the term “fetus” refers to an unborn offspring. As used herein, the term “neonate” refers to a newborn infant, which includes the first 90 days of life. When referring to mice, neonate can refer to animals up to 10 days of age.

[0434] This disclosure also features a system capable of site-specifically integrating a template polynucleotide into the genome of a cell, the system comprising: a lipid nanoparticle (LNP) comprising a gene editor polynucleotide (e.g., a gene editor polynucleotide construct) and a vector comprising a template polynucleotide and at least a first attachment site-containing guide RNA (atgRNA). In some embodiments, the first atgRNA comprises (i) a domain that is capable of guiding the prime editor system to a target sequence; and (ii) a reverse transcriptase (RT) template that comprises at least a portion of a first integration recognition site. In some embodiments, where the vector comprises a polynucleotide encoding a first atgRNA, the RT template comprises the entirety of the first integration recognition site. In some embodiments, where the vector comprises a polynucleotide encoding a first atgRNA, the vector also includes a sequence encoding a nicking guide RNA (ngRNA).

[0435] This disclosure also features a system capable of site-specifically integrating a template polynucleotide into the genome of a cell, the system comprising: a lipid nanoparticle (LNP) comprising a gene editor polynucleotide (e.g., a gene editor polynucleotide construct) and a vector comprising a template polynucleotide and a first attachment site-containing guide RNA (atgRNA) and a second attachment site-containing guide RNA (atgRNA). In some embodiments, the first atgRNA and the second atgRNA are an at least first pair of atgRNAs, wherein the at least first pair of atgRNAs have domains that are capable of guiding the prime editor system to a target sequence, the first atgRNA further includes a first RT template that comprises at least a portion of the a first integration recognition site; and the second atgRNA further includes a second RT template that comprises at least a portion of the first integration recognition site, and the first atgRNA and the second atgRNAs collectively encode the entirety of the first integration recognition site. In such embodiments, the first atgRNA and second atgRNA include at least a 6 bp overlap.

[0436] This disclosure also features a system capable of site-specifically integrating a template polynucleotide into the genome of a cell, the system comprising: a lipid nanoparticle (LNP) comprising: (i) a gene editor polynucleotide (e.g., a gene editor polynucleotide construct), and (ii) a first attachment site-containing guide RNA (atgRNA); and a vector comprising: (i) a template polynucleotide, and (ii) a second atgRNA. In some embodiments, the first atgRNA and the second atgRNA are an at least first pair of atgRNAs, wherein the at least first pair of atgRNAs have domains that are capable of guiding the prime editor system to a target sequence, the first atgRNA further includes a first RT template that comprises at least a portion of the a first integration recognition site; and the second atgRNA further includes a second RT template that comprises at least a portion of the first integration recognition site, and the first atgRNA and the second atgRNAs collectively encode the entirety of the first integration recognition site. In such embodiments, the first atgRNA and second atgRNA include at least a 6 bp overlap.

[0437] This disclosure also features a system capable of site-specifically integrating a template polynucleotide into the genome of a cell, the system comprising: co-delivering: a lipid nanoparticle (LNP) comprising: (i) a gene editor polynucleotide (e.g., a gene editor polynucleotide construct), (ii) a first attachment site-containing guide RNA (atgRNA), and (iii) a second atgRNA; and a vector comprising (i) a template polynucleotide. In some embodiments, the first atgRNA and the second atgRNA are an at least first pair of atgRNAs, wherein the at least first pair of atgRNAs have domains that are capable of guiding the prime editor system to a target sequence, the first atgRNA further includes a first RT template that comprises at least a portion of the a first integration recognition site; and the second atgRNA further includes a second RT template that comprises at least a portion of the first integration recognition site, and the first atgRNA and the second atgRNAs collectively encode the entirety of the first integration recognition site. In such embodiments, the first atgRNA and second atgRNA include at least a 6 bp overlap.

[0438] This disclosure also features a system capable of site-specifically integrating a template polynucleotide into the genome of a cell, the system comprising: a lipid nanoparticle (LNP) comprising: (i) a gene editor polynucleotide (e.g., a gene editor polynucleotide construct) and (ii) a first attachment site-containing guide RNA (atgRNA); and a vector comprising: (i) a template polynucleotide, and (ii) a nicking atgRNA. In some embodiments, the first atgRNA comprises (i) a domain that is capable of guiding the prime editor system to a target sequence; and (ii) a reverse transcriptase (RT) template that comprises at least a portion of a first integration recognition site. In some embodiments, where the vector comprises a polynucleotide encoding a first atgRNA, the RT template comprises the entirety of the first integration recognition site.

[0439] In typical embodiments, the LNP comprising a gene editor polynucleotide construct is capable delivering to a cell cytoplasm the gene editor polynucleotide construct. In some embodiments, the LNP comprising a gene editor polynucleotide construct is capable delivering to a cell nucleus the gene editor polynucleotide construct. In some embodiments, the LNP comprises a gene editor protein and associated guide nucleic acids. In some embodiments, the LNP comprises a gene editor protein and associated guide nucleic acids that are capable of localizing to cell nucleus.

[0440] In some embodiments, a gene editor polynucleotide construct is delivered to a cell by a fusosome. In some embodiments, a gene editor polynucleotide construct is delivered to a cell cytoplasm by a fusosome. In some embodiments, the fusosome comprises a gene editor protein and associated guide nucleic acids.

[0441] In some embodiments, a gene editor polynucleotide construct is delivered to a cell by an exosome. In some embodiments, a gene editor polynucleotide construct is delivered to a cell cytoplasm by an exosome. In some embodiments, the exosome comprises a gene editor protein and associated guide nucleic acids.

[0442] In some embodiments, the prime editor or Gene Writer protein fusion, either of which may have a fused/linked integrase, is incorporated (i.e., packaged) into LNP as protein. Further, associated atgRNA and optional ngRNAs may be co-packaged with gene editor proteins in LNP.

[0443] In some embodiments, the gene editor polynucleotide construct comprises (a) a polynucleotide sequence encoding a prime editor fusion protein or a Gene Writer™ protein, (b) a polynucleotide sequence encoding an attachment site-containing guide RNA (atgRNA), (c) optionally, a polynucleotide sequence encoding a nickase guide RNA (ngRNA), (d) a polynucleotide sequence encoding an integrase, (e) and optionally, a polynucleotide sequence encoding a recombinase.

[0444] In some embodiments, the prime editor or Gene Writer protein fusion, either of which may have a fused/linked integrase, is expressed as a split construct. In typical embodiments, the split construct in reconstituted in a cell. In some embodiments, the split construct can be fused or ligated via intein protein splicing. In some embodiments, the split construct can be reconstituted via protein-protein inter-molecular bonding and/or interactions. In some embodiments, the split construct can be reconstituted via chemical, biological, or environmental induced oligomerization. In certain embodiments, the split construct can be adapted into one or more nucleic acid constructs described herein.

### 6.10.1. Gene Editor Polynucleotide

[0445] In some embodiments, the systems described include a gene editor polynucleotide that is delivered to a cell using the methods described herein. In some embodiments, the gene editor polynucleotide is delivered as a polynucleotide (e.g., an mRNA). In some embodiments, the gene editor polynucleotide is delivered as a protein. In some embodiments, the gene editor polynucleotide or protein is packaged, and thereby vectorized, within a lipid nanoparticle (LNP). In some embodiments, the gene editor polynucleotide or protein is packaged in a LNP and is co-delivered with a template polynucleotide (i.e., nucleic acid “cargo” or nucleic acid “payload”) packaged into a separate vector (e.g., a viral vector (e.g., an AAV or adenovirus)) or a second lipid nanoparticle (LNP).

[0446] In some embodiments, the gene editor polynucleotide is delivered to the cells as a polynucleotide. For example, the gene editor polynucleotide is delivered to the cells as an mRNA encoding the gene editor polynucleotide (e.g., the gene editor protein or the prime editor system). In some embodiments, the mRNA comprises one or more modified uridines. In some embodiments, the mRNA comprises a sequence where each of the uridines is a modified uridine. In some embodiments, the mRNA is uridine depleted. In some embodiments, the mRNA encoding the nickase comprises one or more modified uridines. In some embodiments, the mRNA encoding the reverse transcriptase comprises one or more modified uridines. In some embodiments, the mRNA encoding the nickase comprises one or more modified uridines, and the mRNA encoding the reverse transcriptase comprises one or more modified uridines. In some embodiments, where the integrase is encoded in an mRNA, the mRNA comprises modified uridines. In some embodiments, a modified uridine is a N1-Methylpseudouridine-5′-Triphosphate. In some embodiments, a modified uridine is a pseudouridine. In some embodiments, the mRNA comprises a 5′ cap. In some embodiments, the 5′ cap comprises a molecular formula of C32H43N15024P4 (free acid).

[0447] In some embodiments, the gene editor polynucleotide (e.g., a gene editor polynucleotide construct) comprises a polynucleotide sequence encoding a primer editor system (e.g., any of the prime editor systems described herein). In some embodiments, the prime editor system comprises a nucleotide sequence encoding a nickase (e.g., any of the Cas proteins or variants thereof (e.g., nickases) and nickases described herein, see Tables 4-8) and a nucleotide sequence encoding a reverse transcriptase (e.g., any of the reverse transcriptases described herein). In some embodiments, the nucleotide sequence encoding the nickase and the nucleotide sequence encoding the reverse transcriptase are positioned in the construct such that when expressed the nickase is linked to the reverse transcriptase. In some embodiments, the nickase is linked to the reverse transcriptase by in-frame fusion. In some embodiments, the nickase is linked to the reverse transcriptase by a linker. In some embodiments, the linker is a peptide fused in-frame between the nickase and reverse transcriptase.

[0448] In some embodiments, the gene editor polynucleotide (e.g., a gene editor polynucleotide construct) further comprises a polynucleotide sequence encoding at least a first integrase (e.g., any of the integrases described herein, e.g., as described in Table 10 and also in Yamall et al., Nat. Biotechnol., 2022, doi.org/10.1038/s41587-022-01527-4 and Durrant et al., Nat. Biotechnol., 2022, doi.org/10.1038/s41587-022-01494-w, each of which are herein incorporated by reference in their entireties), wherein the first integrase comprises a Hifi mutation described herein (see section 4.9.1) and optionally a stabilon (see section 4.9.2). In some embodiments, the linked nickase-reverse transcriptase are further linked to the first integrase.

[0449] In some embodiments, the gene editor polynucleotide construct further comprises a polynucleotide sequence encoding at least a first recombinase (e.g., any of the recombinases described herein).

### 6.10.2. Split Nickase and Reverse Transcriptase

[0450] Also provided herein are prime editor systems where the nucleotide sequence encoding the nickase and the nucleotide sequence encoding the reverse transcriptase are positioned in a construct such that when expressed the nickase is not linked to the reverse transcriptase. In a non-limiting example, a sequence encoding a self-cleaving peptide (e.g., a P2A) is positioned between the nucleotide sequence encoding the nickase and the nucleotide sequence encoding the reverse transcriptase such that when expressed the nickase is not linked to the reverse transcriptase (see, e.g., FIG. 34).

[0451] Also provided herein are prime editor systems where the nucleotide sequence encoding the nickase and the nucleotide sequence encoding the reverse transcriptase are on separate polynucleotides. In some embodiments where the prime editor system includes separate polynucleotides encoding the nickase and the reverse transcriptase, the nickase and/or the reverse transcriptase can be engineered such that when expressed they are linked to a binding domain, where the binding domain is part of a binding pair that enables recruitment of the reverse transcriptase to the genomic location of the nickase (e.g., nCas9). A binding pair can be any pair of molecules wherein upon forming the binding pair the binding domains enable recruitment of the reverse transcriptase to the genomic location of the nickase. Once in sufficient proximity with each other the binding domains can dimerize. This dimerization (or other type of interaction) brings the nickase and RT into proximity with each other, thereby enhancing the reverse transcription of the RT template in the atgRNA.

[0452] Non-limiting examples of binding pairs that can aid recruitment of the RT to the genomic location of the nickase include without limitation: dimerizing leucine zippers, an antigen and a corresponding antigen binding domains (e.g., antibody), RNA aptamers and corresponding RNA aptamer binding proteins, affinity tags and corresponding affinity tag binding proteins.

[0453] In some embodiments, dimerizing leucine zippers that can serve as a binding pair includes two binding domains: a Leucine Zip LZ1 domain having a sequence with at least 80%, 85%, 90%, 95%, or 99% sequence identity to a sequence of SEQ ID NO: 568 and a Leucine Zip LZ2 domain having a sequence with at least 80%, 85%, 90%, 95%, or 99% sequence identity to a sequence of SEQ ID NO: 569. In one embodiment, the Leucine Zip LZ1 domain is positioned either N-terminally or C-terminally to the nickase and the Leucine Zip LZ2 is positioned either N-terminally or C-terminally to the RT. In one embodiment, the Leucine Zip LZ1 domain is positioned either N-terminally or C-terminally to the RT and the Leucine Zip LZ2 domain is positioned either N-terminally or C-terminally to the Cas9.

| SEQ ID | | |
|---|---|---|
| NO: | ame | Sequence |
| 724 | eucine | RLEIRAAFLRQRNTALRTEVAE |
| | Zip LZ1 | LEQEVQRLENEVSQYETRYGPL |
| | domain | GGGK |
| 725 | eucine | LEIEAAFLERENTALETRVAEL |
| | Zip LZ2 | RQRVQRLRNRVSQYRTRYGPLG |
| | domain | GGKSGGSSGGSSGSETPGTSES |
| | | ATPESSGGSSGGSS |

[0454] In one embodiment, the system and methods described herein include a construct that encodes a polypeptide having a sequence with at least 80%, 85%, 90%, 95%, or 99% sequence identity to a sequence of SEQ ID NO: 576 (a Leucine Zip LZ1 domain positioned C-terminally to the nickase), and a construct that encodes a polypeptide having a sequence with at least 80%, 85%, 90%, 95%, or 99% sequence identity to a sequence of SEQ ID NO: 577 (a Leucine Zip LZ2 domain positioned N-terminally to the RT).

[0455] In one embodiment, the system and methods described herein include a construct that encodes a polypeptide having a sequence with at least 80%, 85%, 90%, 95%, or 99% sequence identity to a sequence of SEQ ID NO: 578 (a Leucine Zip LZ1 domain positioned N-terminally to the nickase), and a construct that encodes a polypeptide having a sequence with at least 80%, 85%, 90%, 95%, or 99% sequence identity to a sequence of SEQ ID NO: 577 (a Leucine Zip LZ2 domain positioned N-terminally to the RT).

[0456] In some embodiments, dimerizing leucine zippers that can serve as a binding pair includes two binding domains: a EE₁₂₃₄L peptide having a sequence with at least 80%, 85%, 90%, 95%, or 99% sequence identity to a sequence of SEQ ID NO: 570 and a RR₁₂₃₄L peptide having a sequence with at least 80%, 85%, 90%, 95%, or 99% sequence identity to a sequence of SEQ ID NO: 571. In one embodiment, the EE₁₂₃₄L peptide is positioned either N-terminally or C-terminally to the nickase and the RR₁₂₃₄L peptide is positioned either N-terminally or C-terminally to the RT. In one embodiment, the EE₁₂₃₄L peptide is positioned either N-terminally or C-terminally to the RT and the RR₁₂₃₄L peptide is positioned either N-terminally or C-terminally to the Cas9.

| EQ ID | | |
|---|---|---|
| NO: | ame | Sequence |
| 726 | E₁₂₃₄L | LEIEAAFLEQENTALETEVAEL |
| | peptide | LEQEVQRLENIVSQYETRYGPG |
| | | GGK |
| 727 | R₁₂₃₄L | KGGGLEIRAAFLRRRNTALRTR |
| | peptide | VAELRQRVQRLRNIVSQYETRY |
| | | GPL |

[0457] In one embodiment, the system and methods described herein include a construct that encodes a polypeptide having a sequence with at least 80%, 85%, 90%, 95%, or 99% sequence identity to a sequence of SEQ ID NO: 579 (a EE₁₂₃₄L peptide positioned N-terminally to the nickase), and a construct that encodes a polypeptide having a sequence with at least 80%, 85%, 90%, 95%, or 99% sequence identity to a sequence of SEQ ID NO: 580 (a RR1234L peptide positioned N-terminally to the RT).

[0458] In some embodiments, an affinity tag is a SpyTag and the corresponding affinity tag binding protein is SpyCatcher, where upon binding of the SpyTag with the SpyCatcher the fusion protein is a covalently stabilized multi-protein complex. In one embodiment, the affinity tag (e.g., SpyTag) is positioned either N-terminally or C-terminally to the nickase and the affinity tag binding protein (e.g, SpyCatcher) is positioned either N-terminally or C-terminally to the RT. In one embodiment, the affinity tag (e.g., SpyTag) is positioned either N-terminally or C-terminally to the RT and the affinity tag binding protein (e.g, SpyCatcher) is positioned either N-terminally or C-terminally to the nickase.

[0459] In some embodiments, an antigen and corresponding antigen binding domain includes an antigen such as a peptide present within a tag or a tag itself and an antigen binding domain that binds specifically to the antigen. In one embodiments, an antigen is a GCN4 peptide within a SunTag and the antigen binding domain is an anti-GCN4 scFv. In one embodiment, the SunTag (GCN4 peptide) is positioned either N-terminally or C-terminally to the nickase and the anti-GCN4 antigen binding domain is positioned either N-terminally or C-terminally to the RT. In one embodiment, the SunTag (GCN4 peptide) is positioned either N-terminally or C-terminally to the RT and the anti-GCN4 antigen binding domain is positioned either N-terminally or C-terminally to the nickase.

[0460] In one embodiment, the system and methods described herein include a construct that encodes a polypeptide having a sequence with at least 80%, 85%, 90%, 95%, or 99% sequence identity to a sequence of SEQ ID NO: 574 (SunTag (GCN4 peptide) positioned C-terminally to the nickase), and a construct that encodes a polypeptide having a sequence with at least 80%, 85%, 90%, 95%, or 99% sequence identity to a sequence of SEQ ID NO: 575 (anti-GCN4 antigen binding domain positioned N-terminally to the RT).

[0461] In some embodiments, provided herein are prime editor systems where a construct includes a nucleotide sequence encoding a self-cleaving peptide (e.g., a P2A) positioned between the nucleotide sequence encoding the nickase and the nucleotide sequence encoding the RT. In such cases, the position of the nucleotide sequence encoding the nickase, the nucleotide sequence encoding the self-cleaving peptide (e.g., a P2A), and the nucleotide sequence encoding the RT is such that when expressed the nickase is not linked to the reverse transcriptase. In one embodiment, the construct includes the nucleotide sequences positioned 5′-3′: nucleotide sequence encoding the nickase, nucleotide sequence encoding the self-cleaving peptide (e.g., a P2A), and nucleotide sequence encoding the RT. In one embodiment, the construct includes the nucleotide sequences positioned 5′-3′: nucleotide sequence encoding the RT, nucleotide sequence encoding the self-cleaving peptide (e.g., a P2A), and nucleotide sequence encoding the nickase.

[0462] In one embodiment, the construct that includes a nucleotide sequence encoding a self-cleaving peptide (e.g., a P2A) positioned between the nucleotide sequence encoding the nickase and the nucleotide sequence encoding the RT has an amino acid sequence with at least 80%, 85%, 90%, 95%, or 99% sequence identity to a sequence of SEQ ID NO: 581 or 582 (see FIG. 34).

| SEQ ID | | |
|---|---|---|
| NO: | Name | Sequence |
| 747 | PL1427 | MKRTADGSEFESPKKKRKVDKKYSIGLDIGTNSVGWAVITDEYKVPSKKFKVLGN |
| | | TDRHSIKKNLIGALLFDSGETAEATRLKRTARRRYTRRKNRICYLQEIFSNEMAK |
| | | VDDSFFHRLEESFLVEEDKKHERHPIFGNIVDEVAYHEKYPTIYHLRKKLVDSTD |
| | | KADLRLIYLALAHMIKFRGHFLIEGDLNPDNSDVDKLFIQLVQTYNQLFEENPIN |
| | | ASGVDAKAILSARLSKSRRLENLIAQLPGEKKNGLFGNLIALSLGLTPNFKSNFD |
| | | LAEDAKLQLSKDTYDDDLDNLLAQIGDQYADLFLAAKNLSDAILLSDILRVNTEI |
| | | TKAPLSASMIKRYDEHHQDLTLLKALVRQQLPEKYKEIFFDQSKNGYAGYIDGGA |
| | | SQEEFYKFIKPILEKMDGTEELLVKLNREDLLRKQRTFDNGSIPHQIHLGELHAI |
| | | LRRQEDFYPFLKDNREKIEKILTFRIPYYVGPLARGNSRFAWMTRKSEETITPWN |
| | | FEEVVDKGASAQSFIERMTNFDKNLPNEKVLPKHSLLYEYFTVYNELTKVKYVTE |
| | | GMRKPAFLSGEQKKAIVDLLFKTNRKVTVKQLKEDYFKKIECFDSVEISGVEDRF |
| | | NASLGTYHDLLKIIKDKDFLDNEENEDILEDIVLTLTLFEDREMIEERLKTYAHL |
| | | FDDKVMKQLKRRRYTGWGRLSRKLINGIRDKQSGKTILDFLKSDGFANRNFMQLI |
| | | HDDSLTFKEDIQKAQVSGQGDSLHEHIANLAGSPAIKKGILQTVKVVDELVKVMG |
| | | RHKPENIVIEMARENQTTQKGQKNSRERMKRIEEGIKELGSQILKEHPVENTQLQ |
| | | NEKLYLYYLQNGRDMYVDQELDINRLSDYDVDAIVPQSFLKDDSIDNKVLTRSDK |
| | | NRGKSDNVPSEEVVKKMKNYWRQLLNAKLITQRKFDNLTKAERGGLSELDKAGFI |
| | | KRQLVETRQITKHVAQILDSRMNTKYDENDKLIREVKVITLKSKLVSDFRKDFQF |
| | | YKVREINNYHHAHDAYLNAVVGTALIKKYPKLESEFVYGDYKVYDVRKMIAKSEQ |
| | | EIGKATAKYFFYSNIMNFFKTEITLANGEIRKRPLIETNGETGEIVWDKGRDFAT |
| | | VRKVLSMPQVNIVKKTEVQTGGFSKESILPKRNSDKLIARKKDWDPKKYGGFDSP |
| | | TVAYSVLWVAKVEKGKSKKLKSVKELLGITIMERSSFEKNPIDFLEAKGYKEVKK |
| | | DLIIKLPKYSLFELENGRKRMLASAGELQKGNELALPSKYVNFLYLASHYEKLKG |
| | | SPEDNEQKQLFVEQHKHYLDEIIEQISEFSKRVILADANLDKVLSAYNKHRDKPI |
| | | REQAENIIHLFTLTNLGAPAAFKYFDTTIDRKRYTSTKEVLDATLIHQSITGLYE |
| | | TRIDLSQLGGDGSGSGEELLSKNYHLENEVARLKKGSGSGEELLSKNYHLENEVA |
| | | RLKKSGGSKRTADGSEFESPKKKRKVGGSVSGWRLFKKIS** |
| 748 | PL1428 | MKRTADGSEFESPKKKRKVGPDIVMTQSPSSLSASVGDRVTITCRSSTGAVTTSN |
| | | YASWVQEKPGKLFKGLIGGTNNRAPGVPSRFSGSLIGDKATLTISSLQPEDFATY |
| | | FCALWYSNHWVFGQGTKVELKRGGGGSGGGGSGGGGSSGGGSEVKLLESGGGLVQ |
| | | PGGSLKLSCAVSGFSLTDYGVNWVRQAPGRGLEWIGVIWGDGITDYNSALKDRFI |
| | | ISKDNGKNTVYLQMSKVRSDDTALYYCVTGLFDYWGQGTLVTVSSGSGLNIEDEY |
| | | RLHETSKEPDVSLGSTWLSDFPQAWAETGGMGLAVRQAPLIIPLKATSTPVSIKQ |
| | | YPMSQEARLGIKPHIQRLLDQGILVPCQSPWNTPLLPVKKPGTNDYRPVQDLREV |
| | | NKRVEDIHPTVPNPYNLLSGLPPSHQWYTVLDLKDAFFCLRLHPTSQPLFAFEWR |
| | | DPEMGISGQLTWTRLPQGFKNSPTLFNEALHRDLADFRIQHPDLILLQYVDDLLL |
| | | AATSELDCQQGTRALLQTLGNLGYRASAKKAQICQKQVKYLGYLLKEGQRWLTEA |
| | | RKETVMGQPTPKTPRQLREFLGKAGFCRLFIPGFAEMAAPLYPLTKPGTLFNWGP |
| | | DQQKAYQEIKQALLTAPALGLPDLTKPFELFVDEKQGYAKGVLTQKLGPWRRPVA |
| | | YLSKKLDPVAAGWPPCLRMVAAIAVLTKDAGKLTMGQPLVILAPHAVEALVKQPP |
| | | DRWLSNARMTHYQALLLDTDRVQFGPVVALNPATLLPLPEEGLQHNCLDILAEAH |
| | | GTRPDLTDQPLPDADHTWYTDGSSLLQEGQRKAGAAVTTETEVIWAKALPAGTSA |
| | | QRAELIALTQALKMAEGKKLNVYTDSRYAFATAHIHGEIYRRRGWLTSEGKEIKN |
| | | KDEILALLKALFLPKRLSIIHCPGHQKGHSAEARGNRMADQAARKAAITETPDTS |
| | | TLLIENSSPSGGSKRTADGSEFEPKKKRKVGGSVSGWRLFKKIS** |
| 749 | PL1597 | MKRTADGSEFESPKKKRKVDKKYSIGLDIGTNSVGWAVITDEYKVPSKKFKVLGN |
| | | TDRHSIKKNLIGALLFDSGETAEATRLKRTARRRYTRRKNRICYLQEIFSNEMAK |
| | | VDDSFFHRLEESFLVEEDKKHERHPIFGNIVDEVAYHEKYPTIYHLRKKLVDSTD |
| | | KADLRLIYLALAHMIKFRGHFLIEGDLNPDNSDVDKLFIQLVQTYNQLFEENPIN |
| | | ASGVDAKAILSARLSKSRRLENLIAQLPGEKKNGLFGNLIALSLGLTPNFKSNFD |
| | | LAEDAKLQLSKDTYDDDLDNLLAQIGDQYADLFLAAKNLSDAILLSDILRVNTEI |
| | | TKAPLSASMIKRYDEHHQDLTLLKALVRQQLPEKYKEIFFDQSKNGYAGYIDGGA |
| | | SQEEFYKFIKPILEKMDGTEELLVKLNREDLLRKQRTFDNGSIPHQIHLGELHAI |
| | | LRRQEDFYPFLKDNREKIEKILTFRIPYYVGPLARGNSRFAWMTRKSEETITPWN |
| | | FEEVVDKGASAQSFIERMTNFDKNLPNEKVLPKHSLLYEYFTVYNELTKVKYVTE |
| | | GMRKPAFLSGEQKKAIVDLLFKTNRKVTVKQLKEDYFKKIECFDSVEISGVEDRF |
| | | NASLGTYHDLLKIIKDKDFLDNEENEDILEDIVLTLTLFEDREMIEERLKTYAHL |
| | | FDDKVMKQLKRRRYTGWGRLSRKLINGIRDKQSGKTILDFLKSDGFANRNFMQLI |
| | | HDDSLTFKEDIQKAQVSGQGDSLHEHIANLAGSPAIKKGILQTVKVVDELVKVMG |
| | | RHKPENIVIEMARENQTTQKGQKNSRERMKRIEEGIKELGSQILKEHPVENTQLQ |
| | | NEKLYLYYLQNGRDMYVDQELDINRLSDYDVDAIVPQSFLKDDSIDNKVLTRSDK |
| | | NRGKSDNVPSEEVVKKMKNYWRQLLNAKLITQRKFDNLTKAERGGLSELDKAGFI |
| | | KRQLVETRQITKHVAQILDSRMNTKYDENDKLIREVKVITLKSKLVSDFRKDFQF |
| | | YKVREINNYHHAHDAYLNAVVGTALIKKYPKLESEFVYGDYKVYDVRKMIAKSEQ |
| | | EIGKATAKYFFYSNIMNFFKTEITLANGEIRKRPLIETNGETGEIVWDKGRDFAT |
| | | VRKVLSMPQVNIVKKTEVQTGGFSKESILPKRNSDKLIARKKDWDPKKYGGFDSP |
| | | TVAYSVLWVAKVEKGKSKKLKSVKELLGITIMERSSFEKNPIDFLEAKGYKEVKK |
| | | DLIIKLPKYSLFELENGRKRMLASAGELQKGNELALPSKYVNFLYLASHYEKLKG |
| | | SPEDNEQKQLFVEQHKHYLDEIIEQISEFSKRVILADANLDKVLSAYNKHRDKPI |
| | | REQAENIIHLFTLTNLGAPAAFKYFDTTIDRKRYTSTKEVLDATLIHQSITGLYE |
| | | TRIDLSQLGGDGGGSPKKKRKVGGGGSGGRLEIRAAFLRQRNTALRTEVAELEQE |
| | | VQRLENEVSQYETRYGPLGGGK** |
| 750 | PL1598 | MLEIEAAFLERENTALETRVAELRQRVQRLRNRVSQYRTRYGPLGGGKSGGSSGG |
| | | SSGSETPGTSESATPESSGGSSGGSSKRTADGSEFESPKKKRKVLNIEDEYRLHE |
| | | TSKEPDVSLGSTWLSDFPQAWAETGGMGLAVRQAPLIIPLKATSTPVSIKQYPMS |
| | | QEARLGIKPHIQRLLDQGILVPCQSPWNTPLLPVKKPGTNDYRPVQDLREVNKRV |
| | | EDIHPTVPNPYNLLSGLPPSHQWYTVLDLKDAFFCLRLHPTSQPLFAFEWRDPEM |
| | | GISGQLTWTRLPQGFKNSPTLFNEALHRDLADFRIQHPDLILLQYVDDLLLAATS |
| | | ELDCQQGTRALLQTLGNLGYRASAKKAQICQKQVKYLGYLLKEGQRWLTEARKET |
| | | VMGQPTPKTPRQLREFLGKAGFCRLFIPGFAEMAAPLYPLTKPGTLFNWGPDQQK |
| | | AYQEIKQALLTAPALGLPDLTKPFELFVDEKQGYAKGVLTQKLGPWRRPVAYLSK |
| | | KLDPVAAGWPPCLRMVAAIAVLTKDAGKLTMGQPLVILAPHAVEALVKQPPDRWL |
| | | SNARMTHYQALLLDTDRVQFGPVVALNPATLLPLPEEGLQHNCLDILAEAHGTRP |
| | | DLTDQPLPDADHTWYTDGSSLLQEGQRKAGAAVTTETEVIWAKALPAGTSAQRAE |
| | | LIALTQALKMAEGKKLNVYTDSRYAFATAHIHGEIYRRRGWLTSEGKEIKNKDEI |
| | | LALLKALFLPKRLSIIHCPGHQKGHSAEARGNRMADQAARKAAITETPDTSTLLI |
| | | ENSSPSGGSKRTADGSEFEPKKKRKVGGSVSGWRLFKKIS** |
| 578 | PL1599 | MRLEIRAAFLRQRNTALRTEVAELEQEVQRLENEVSQYETRYGPLGGGKGGGGSG |
| | | GKRTADGSEFESPKKKRKVDKKYSIGLDIGTNSVGWAVITDEYKVPSKKFKVLGN |
| | | TDRHSIKKNLIGALLFDSGETAEATRLKRTARRRYTRRKNRICYLQEIFSNEMAK |
| | | VDDSFFHRLEESFLVEEDKKHERHPIFGNIVDEVAYHEKYPTIYHLRKKLVDSTD |
| | | KADLRLIYLALAHMIKFRGHFLIEGDLNPDNSDVDKLFIQLVQTYNQLFEENPIN |
| | | ASGVDAKAILSARLSKSRRLENLIAQLPGEKKNGLFGNLIALSLGLTPNFKSNFD |
| | | LAEDAKLQLSKDTYDDDLDNLLAQIGDQYADLFLAAKNLSDAILLSDILRVNTEI |
| | | TKAPLSASMIKRYDEHHQDLTLLKALVRQQLPEKYKEIFFDQSKNGYAGYIDGGA |
| | | SQEEFYKFIKPILEKMDGTEELLVKLNREDLLRKQRTFDNGSIPHQIHLGELHAI |
| | | LRRQEDFYPFLKDNREKIEKILTFRIPYYVGPLARGNSRFAWMTRKSEETITPWN |
| | | FEEVVDKGASAQSFIERMTNFDKNLPNEKVLPKHSLLYEYFTVYNELTKVKYVTE |
| | | GMRKPAFLSGEQKKAIVDLLFKTNRKVTVKQLKEDYFKKIECFDSVEISGVEDRF |
| | | NASLGTYHDLLKIIKDKDFLDNEENEDILEDIVLTLTLFEDREMIEERLKTYAHL |
| | | FDDKVMKQLKRRRYTGWGRLSRKLINGIRDKQSGKTILDFLKSDGFANRNFMQLI |
| | | HDDSLTFKEDIQKAQVSGQGDSLHEHIANLAGSPAIKKGILQTVKVVDELVKVMG |
| | | RHKPENIVIEMARENQTTQKGQKNSRERMKRIEEGIKELGSQILKEHPVENTQLQ |
| | | NEKLYLYYLQNGRDMYVDQELDINRLSDYDVDAIVPQSFLKDDSIDNKVLTRSDK |
| | | NRGKSDNVPSEEVVKKMKNYWRQLLNAKLITQRKFDNLTKAERGGLSELDKAGFI |
| | | KRQLVETRQITKHVAQILDSRMNTKYDENDKLIREVKVITLKSKLVSDFRKDFQF |
| | | YKVREINNYHHAHDAYLNAVVGTALIKKYPKLESEFVYGDYKVYDVRKMIAKSEQ |
| | | EIGKATAKYFFYSNIMNFFKTEITLANGEIRKRPLIETNGETGEIVWDKGRDFAT |
| | | VRKVLSMPQVNIVKKTEVQTGGFSKESILPKRNSDKLIARKKDWDPKKYGGFDSP |
| | | TVAYSVLWVAKVEKGKSKKLKSVKELLGITIMERSSFEKNPIDFLEAKGYKEVKK |
| | | DLIIKLPKYSLFELENGRKRMLASAGELQKGNELALPSKYVNFLYLASHYEKLKG |
| | | SPEDNEQKQLFVEQHKHYLDEIIEQISEFSKRVILADANLDKVLSAYNKHRDKPI |
| | | REQAENIIHLFTLTNLGAPAAFKYFDTTIDRKRYTSTKEVLDATLIHQSITGLYE |
| | | TRIDLSQLGGDGGGSPKKKRKV** |
| 579 | PL1600 | MKRTADGSEFESPKKKRKVDKKYSIGLDIGTNSVGWAVITDEYKVPSKKFKVLGN |
| | | TDRHSIKKNLIGALLFDSGETAEATRLKRTARRRYTRRKNRICYLQEIFSNEMAK |
| | | VDDSFFHRLEESFLVEEDKKHERHPIFGNIVDEVAYHEKYPTIYHLRKKLVDSTD |
| | | KADLRLIYLALAHMIKFRGHFLIEGDLNPDNSDVDKLFIQLVQTYNQLFEENPIN |
| | | ASGVDAKAILSARLSKSRRLENLIAQLPGEKKNGLFGNLIALSLGLTPNFKSNFD |
| | | LAEDAKLQLSKDTYDDDLDNLLAQIGDQYADLFLAAKNLSDAILLSDILRVNTEI |
| | | TKAPLSASMIKRYDEHHQDLTLLKALVRQQLPEKYKEIFFDQSKNGYAGYIDGGA |
| | | SQEEFYKFIKPILEKMDGTEELLVKLNREDLLRKQRTFDNGSIPHQIHLGELHAI |
| | | LRRQEDFYPFLKDNREKIEKILTFRIPYYVGPLARGNSRFAWMTRKSEETITPWN |
| | | FEEVVDKGASAQSFIERMTNFDKNLPNEKVLPKHSLLYEYFTVYNELTKVKYVTE |
| | | GMRKPAFLSGEQKKAIVDLLFKTNRKVTVKQLKEDYFKKIECFDSVEISGVEDRF |
| | | NASLGTYHDLLKIIKDKDFLDNEENEDILEDIVLTLTLFEDREMIEERLKTYAHL |
| | | FDDKVMKQLKRRRYTGWGRLSRKLINGIRDKQSGKTILDFLKSDGFANRNFMQLI |
| | | HDDSLTFKEDIQKAQVSGQGDSLHEHIANLAGSPAIKKGILQTVKVVDELVKVMG |
| | | RHKPENIVIEMARENQTTQKGQKNSRERMKRIEEGIKELGSQILKEHPVENTQLQ |
| | | NEKLYLYYLQNGRDMYVDQELDINRLSDYDVDAIVPQSFLKDDSIDNKVLTRSDK |
| | | NRGKSDNVPSEEVVKKMKNYWRQLLNAKLITQRKFDNLTKAERGGLSELDKAGFI |
| | | KRQLVETRQITKHVAQILDSRMNTKYDENDKLIREVKVITLKSKLVSDFRKDFQF |
| | | YKVREINNYHHAHDAYLNAVVGTALIKKYPKLESEFVYGDYKVYDVRKMIAKSEQ |
| | | EIGKATAKYFFYSNIMNFFKTEITLANGEIRKRPLIETNGETGEIVWDKGRDFAT |
| | | VRKVLSMPQVNIVKKTEVQTGGFSKESILPKRNSDKLIARKKDWDPKKYGGFDSP |
| | | TVAYSVLWVAKVEKGKSKKLKSVKELLGITIMERSSFEKNPIDFLEAKGYKEVKK |
| | | DLIIKLPKYSLFELENGRKRMLASAGELQKGNELALPSKYVNFLYLASHYEKLKG |
| | | SPEDNEQKQLFVEQHKHYLDEIIEQISEFSKRVILADANLDKVLSAYNKHRDKPI |
| | | REQAENIIHLFTLTNLGAPAAFKYFDTTIDRKRYTSTKEVLDATLIHQSITGLYE |
| | | TRIDLSQLGGDGGGSPKKKRKVGGGGSGGLEIEAAFLEQENTALETEVAELEQEV |
| | | QRLENIVSQYETRYGPLGGGK** |
| 580 | PL1601 | MKGGGLEIRAAFLRRRNTALRTRVAELRQRVQRLRNIVSQYETRYGPLGGGGSGG |
| | | KRTADGSEFESPKKKRKVLNIEDEYRLHETSKEPDVSLGSTWLSDFPQAWAETGG |
| | | MGLAVRQAPLIIPLKATSTPVSIKQYPMSQEARLGIKPHIQRLLDQGILVPCQSP |
| | | WNTPLLPVKKPGTNDYRPVQDLREVNKRVEDIHPTVPNPYNLLSGLPPSHQWYTV |
| | | LDLKDAFFCLRLHPTSQPLFAFEWRDPEMGISGQLTWTRLPQGFKNSPTLFNEAL |
| | | HRDLADFRIQHPDLILLQYVDDLLLAATSELDCQQGTRALLQTLGNLGYRASAKK |
| | | AQICQKQVKYLGYLLKEGQRWLTEARKETVMGQPTPKTPRQLREFLGKAGFCRLF |
| | | IPGFAEMAAPLYPLTKPGTLFNWGPDQQKAYQEIKQALLTAPALGLPDLTKPFEL |
| | | FVDEKQGYAKGVLTQKLGPWRRPVAYLSKKLDPVAAGWPPCLRMVAAIAVLTKDA |
| | | GKLTMGQPLVILAPHAVEALVKQPPDRWLSNARMTHYQALLLDTDRVQFGPVVAL |
| | | NPATLLPLPEEGLQHNCLDILAEAHGTRPDLTDQPLPDADHTWYTDGSSLLQEGQ |
| | | RKAGAAVTTETEVIWAKALPAGTSAQRAELIALTQALKMAEGKKLNVYTDSRYAF |
| | | ATAHIHGEIYRRRGWLTSEGKEIKNKDEILALLKALFLPKRLSIIHCPGHQKGHS |
| | | AEARGNRMADQAARKAAITETPDTSTLLIENSSPSGGSKRTADGSEFEPKKKRKV |
| | | GGSVSGWRLFKKIS** |
| 581 | PL1697 | MKRTADGSEFESPKKKRKVDKKYSIGLDIGTNSVGWAVITDEYKVPSKKFKVLGN |
| | | TDRHSIKKNLIGALLFDSGETAEATRLKRTARRRYTRRKNRICYLQEIFSNEMAK |
| | | VDDSFFHRLEESFLVEEDKKHERHPIFGNIVDEVAYHEKYPTIYHLRKKLVDSTD |
| | | KADLRLIYLALAHMIKFRGHFLIEGDLNPDNSDVDKLFIQLVQTYNQLFEENPIN |
| | | ASGVDAKAILSARLSKSRRLENLIAQLPGEKKNGLFGNLIALSLGLTPNFKSNFD |
| | | LAEDAKLQLSKDTYDDDLDNLLAQIGDQYADLFLAAKNLSDAILLSDILRVNTEI |
| | | TKAPLSASMIKRYDEHHQDLTLLKALVRQQLPEKYKEIFFDQSKNGYAGYIDGGA |
| | | SQEEFYKFIKPILEKMDGTEELLVKLNREDLLRKQRTFDNGSIPHQIHLGELHAI |
| | | LRRQEDFYPFLKDNREKIEKILTFRIPYYVGPLARGNSRFAWMTRKSEETITPWN |
| | | FEEVVDKGASAQSFIERMTNFDKNLPNEKVLPKHSLLYEYFTVYNELTKVKYVTE |
| | | GMRKPAFLSGEQKKAIVDLLFKTNRKVTVKQLKEDYFKKIECFDSVEISGVEDRF |
| | | NASLGTYHDLLKIIKDKDFLDNEENEDILEDIVLTLTLFEDREMIEERLKTYAHL |
| | | FDDKVMKQLKRRRYTGWGRLSRKLINGIRDKQSGKTILDFLKSDGFANRNFMQLI |
| | | HDDSLTFKEDIQKAQVSGQGDSLHEHIANLAGSPAIKKGILQTVKVVDELVKVMG |
| | | RHKPENIVIEMARENQTTQKGQKNSRERMKRIEEGIKELGSQILKEHPVENTQLQ |
| | | NEKLYLYYLQNGRDMYVDQELDINRLSDYDVDAIVPQSFLKDDSIDNKVLTRSDK |
| | | NRGKSDNVPSEEVVKKMKNYWRQLLNAKLITQRKFDNLTKAERGGLSELDKAGFI |
| | | KRQLVETRQITKHVAQILDSRMNTKYDENDKLIREVKVITLKSKLVSDFRKDFQF |
| | | YKVREINNYHHAHDAYLNAVVGTALIKKYPKLESEFVYGDYKVYDVRKMIAKSEQ |
| | | EIGKATAKYFFYSNIMNFFKTEITLANGEIRKRPLIETNGETGEIVWDKGRDFAT |
| | | VRKVLSMPQVNIVKKTEVQTGGFSKESILPKRNSDKLIARKKDWDPKKYGGFDSP |
| | | TVAYSVLWVAKVEKGKSKKLKSVKELLGITIMERSSFEKNPIDFLEAKGYKEVKK |
| | | DLIIKLPKYSLFELENGRKRMLASAGELQKGNELALPSKYVNFLYLASHYEKLKG |
| | | SPEDNEQKQLFVEQHKHYLDEIIEQISEFSKRVILADANLDKVLSAYNKHRDKPI |
| | | REQAENIIHLFTLTNLGAPAAFKYFDTTIDRKRYTSTKEVLDATLIHQSITGLYE |
| | | TRIDLSQLGGDGGGSPKKKRKVGSGATNFSLLKQAGDVEENPGPKRTADGSEFES |
| | | PKKKRKVLNIEDEYRLHETSKEPDVSLGSTWLSDFPQAWAETGGMGLAVRQAPLI |
| | | IPLKATSTPVSIKQYPMSQEARLGIKPHIQRLLDQGILVPCQSPWNTPLLPVKKP |
| | | GTNDYRPVQDLREVNKRVEDIHPTVPNPYNLLSGLPPSHQWYTVLDLKDAFFCLR |
| | | LHPTSQPLFAFEWRDPEMGISGQLTWTRLPQGFKNSPTLFNEALHRDLADFRIQH |
| | | PDLILLQYVDDLLLAATSELDCQQGTRALLQTLGNLGYRASAKKAQICQKQVKYL |
| | | GYLLKEGQRWLTEARKETVMGQPTPKTPRQLREFLGKAGFCRLFIPGFAEMAAPL |
| | | YPLTKPGTLFNWGPDQQKAYQEIKQALLTAPALGLPDLTKPFELFVDEKQGYAKG |
| | | VLTQKLGPWRRPVAYLSKKLDPVAAGWPPCLRMVAAIAVLTKDAGKLTMGQPLVI |
| | | LAPHAVEALVKQPPDRWLSNARMTHYQALLLDTDRVQFGPVVALNPATLLPLPEE |
| | | GLQHNCLDILAEAHGTRPDLTDQPLPDADHTWYTDGSSLLQEGQRKAGAAVTTET |
| | | EVIWAKALPAGTSAQRAELIALTQALKMAEGKKLNVYTDSRYAFATAHIHGEIYR |
| | | RRGWLTSEGKEIKNKDEILALLKALFLPKRLSIIHCPGHQKGHSAEARGNRMADQ |
| | | AARKAAITETPDTSTLLIENSSPSGGSKRTADGSEFEPKKKRKV** |
| 582 | PL1698 | MKRTADGSEFESPKKKRKVLNIEDEYRLHETSKEPDVSLGSTWLSDFPQAWAETG |
| | | GMGLAVRQAPLIIPLKATSTPVSIKQYPMSQEARLGIKPHIQRLLDQGILVPCQS |
| | | PWNTPLLPVKKPGTNDYRPVQDLREVNKRVEDIHPTVPNPYNLLSGLPPSHQWYT |
| | | VLDLKDAFFCLRLHPTSQPLFAFEWRDPEMGISGQLTWTRLPQGFKNSPTLFNEA |
| | | LHRDLADFRIQHPDLILLQYVDDLLLAATSELDCQQGTRALLQTLGNLGYRASAK |
| | | KAQICQKQVKYLGYLLKEGQRWLTEARKETVMGQPTPKTPRQLREFLGKAGFCRL |
| | | FIPGFAEMAAPLYPLTKPGTLFNWGPDQQKAYQEIKQALLTAPALGLPDLTKPFE |
| | | LFVDEKQGYAKGVLTQKLGPWRRPVAYLSKKLDPVAAGWPPCLRMVAAIAVLTKD |
| | | AGKLTMGQPLVILAPHAVEALVKQPPDRWLSNARMTHYQALLLDTDRVQFGPWVA |
| | | LNPATLLPLPEEGLQHNCLDILAEAHGTRPDLTDQPLPDADHTWYTDGSSLLQEG |
| | | QRKAGAAVTTETEVIWAKALPAGTSAQRAELIALTQALKMAEGKKLNVYTDSRYA |
| | | FATAHIHGEIYRRRGWLTSEGKEIKNKDEILALLKALFLPKRLSIIHCPGHQKGH |
| | | SAEARGNRMADQAARKAAITETPDTSTLLIENSSPSGGSKRTADGSEFEPKKKRK |
| | | VGSGATNFSLLKQAGDVEENPGPKRTADGSEFESPKKKRKVDKKYSIGLDIGTNS |
| | | VGWAVITDEYKVPSKKFKVLGNTDRHSIKKNLIGALLFDSGETAEATRLKRTARR |
| | | RYTRRKNRICYLQEIFSNEMAKVDDSFFHRLEESFLVEEDKKHERHPIFGNIVDE |
| | | VAYHEKYPTIYHLRKKLVDSTDKADLRLIYLALAHMIKFRGHFLIEGDLNPDNSD |
| | | VDKLFIQLVQTYNQLFEENPINASGVDAKAILSARLSKSRRLENLIAQLPGEKKN |
| | | GLFGNLIALSLGLTPNFKSNFDLAEDAKLQLSKDTYDDDLDNLLAQIGDQYADLF |
| | | LAAKNLSDAILLSDILRVNTEITKAPLSASMIKRYDEHHQDLTLLKALVRQQLPE |
| | | KYKEIFFDQSKNGYAGYIDGGASQEEFYKFIKPILEKMDGTEELLVKLNREDLLR |
| | | KQRTFDNGSIPHQIHLGELHAILRRQEDFYPFLKDNREKIEKILTFRIPYYVGPL |
| | | ARGNSRFAWMTRKSEETITPWNFEEVVDKGASAQSFIERMTNFDKNLPNEKVLPK |
| | | HSLLYEYFTVYNELTKVKYVTEGMRKPAFLSGEQKKAIVDLLFKTNRKVTVKQLK |
| | | EDYFKKIECFDSVEISGVEDRFNASLGTYHDLLKIIKDKDFLDNEENEDILEDIV |
| | | LTLTLFEDREMIEERLKTYAHLFDDKVMKQLKRRRYTGWGRLSRKLINGIRDKQS |
| | | GKTILDFLKSDGFANRNFMQLIHDDSLTFKEDIQKAQVSGQGDSLHEHIANLAGS |
| | | PAIKKGILQTVKVVDELVKVMGRHKPENIVIEMARENQTTQKGQKNSRERMKRIE |
| | | EGIKELGSQILKEHPVENTQLQNEKLYLYYLQNGRDMYVDQELDINRLSDYDVDA |
| | | IVPQSFLKDDSIDNKVLTRSDKNRGKSDNVPSEEVVKKMKNYWRQLLNAKLITQR |
| | | KFDNLTKAERGGLSELDKAGFIKRQLVETRQITKHVAQILDSRMNTKYDENDKLI |
| | | REVKVITLKSKLVSDFRKDFQFYKVREINNYHHAHDAYLNAVVGTALIKKYPKLE |
| | | SEFVYGDYKVYDVRKMIAKSEQEIGKATAKYFFYSNIMNFFKTEITLANGEIRKR |
| | | PLIETNGETGEIVWDKGRDFATVRKVLSMPQVNIVKKTEVQTGGFSKESILPKRN |
| | | SDKLIARKKDWDPKKYGGFDSPTVAYSVLWVAKVEKGKSKKLKSVKELLGITIME |
| | | RSSFEKNPIDFLEAKGYKEVKKDLIIKLPKYSLFELENGRKRMLASAGELQKGNE |
| | | LALPSKYVNFLYLASHYEKLKGSPEDNEQKQLFVEQHKHYLDEIIEQISEFSKRV |
| | | ILADANLDKVLSAYNKHRDKPIREQAENIIHLFTLTNLGAPAAFKYFDTTIDRKR |
| | | YTSTKEVLDATLIHQSITGLYETRIDLSQLGGDGGGSPKKKRKV** |

### 6.10.3. Supplementing with Reverse Transcriptase

[0463] This disclosure also features systems and methods that include supplementing with reverse transcriptase. In some embodiments, the system and methods include supplementation with a polynucleotide encoding a supplemental reverse transcriptase (i.e., a separate polynucleotide from the gene editor polynucleotide, which includes a polynucleotide encoding a reverse transcriptase). Systems and methods that include supplementation with reverse transcriptase increase integration efficiency of the at least first integration recognition site into the genome of the cell when compared to systems and methods that do not include supplementation with reverse transcriptase. These systems and methods refer to the supplemental or supplemental reverse transcriptase molecule as “supplementing” or “supplementation” with reverse transcriptase.

[0464] In some embodiments, the supplemental reverse transcriptase is the same as the reverse transcriptase that is included in the gene editor polynucleotide. In some embodiments, the supplemental reverse transcriptase is different from the reverse transcriptase that is included in the gene editor polynucleotide.

[0465] In some embodiments, the polynucleotide encoding the supplemental reverse transcriptase is an mRNA.

[0466] In some embodiments, the supplemental reverse transcriptase is delivered concurrently with the one or more LNP, one or more atgRNA, and the template polynucleotide. In some embodiments, the supplemental reverse transcriptase is delivered to the cell prior to delivering the one or more LNP, one or more atgRNA, and the template polynucleotide to the cell. In some embodiments, the supplemental reverse transcriptase is delivered to the cell after delivering the one or more LNP, one or more atgRNA, and the template polynucleotide to the cell.

[0467] Also provided herein are methods of increasing integration efficiency of the at least first integration recognition site into the genome of the cell, where the method comprises delivering to the cell one or more LNPs, one or more vectors, one or more template polynucleotides and supplementing with a polynucleotide encoding a supplemental reverse transcriptase, where the increase in integration efficiency is in comparison to methods that do not include supplementation with a polynucleotide encoding RT. In such embodiments, the method includes a ratio of 1:1, 1:2, 1:3, 1:4, 1:5, 1:6, 1:7, 1:8, 1:9, or 1:10 of gene editor polynucleotide to polynucleotide encoding the supplemental reverse transcriptase.

[0468] Also provided herein are methods of increasing integration efficiency of the at least first integration recognition site into the genome of the cell, where the method comprises delivering to the cell one or more LNPs, one or more vectors, one or more template polynucleotides, where the gene editor polynucleotide comprises a ratio of a ratio of 1:1, 1:2, 1:3, 1:4, 1:5, 1:6, 1:7, 1:8, 1:9, 1:10 of the nucleotide sequence encoding the nickase to the nucleotide sequence encoding the reverse transcriptase, and where the increase in integration efficiency is in comparison to methods that do not include supplementation with a polynucleotide encoding RT.

### 6.10.3.1 Supplementation of RT when Using a Fused Design

[0469] In some embodiments, the system and methods described herein include supplementation with a polynucleotide encoding a reverse transcriptase, where the polynucleotide is in addition to the gene editor polynucleotide that also includes a polynucleotide encoding a reverse transcriptase.

[0470] In one embodiment, a method for delivering a system capable of site-specifically integrating a template polynucleotide into the genome of a cell, includes delivering one or more LNPs and one or more vectors, and also includes delivering a separate polynucleotide encoding a supplemental reverse transcriptase (RT). In a non-limiting example, a method for delivering a system capable of site-specifically integrating a template polynucleotide into the genome of a cell comprises delivering the gene editor polynucleotide (e.g., a polynucleotide encoding a nickase and a reverse transcriptase either linked or not linked), one or more atgRNA, a template polynucleotide, and a polynucleotide encoding a supplemental reverse transcriptase.

[0471] In some embodiments, the method includes delivering into the cell a ratio of gene editor polynucleotide to polynucleotide encoding the supplemental RT of 1:1, 1:2, 1:3, 1:4, 1:5, 1:6, 1:7, 1:8, 1:9, 1:10, 1:11, 1:12, 1:13, 1:14, 1:15, 1:16, 1:17, 1:18, 1:19, 1:20, 1:21, 1:22, 1:23, 1:24, 1:25, 1:26, 1:27, 1:28, 1:29, 1:30, 1:32, 1:34, 1:36, 1:38, or 1:40 or more. In some embodiments, the method includes delivering into the cell a gene editor polynucleotide and a polynucleotide encoding the supplemental RT, where the polynucleotide encoding the supplemental RT is delivered at 1.5 times (1.5×), 2×, 3×, 4×, 5×, 6×, 7×, 8×, 9×, 10×, 20×, 30×, 40×, 50×, 60×, 70×, 80×, 90×, or 100× or more the amount of the gene editor polynucleotide.

[0472] In some embodiments, the method includes delivering into the cell a ratio of polynucleotide encoding the nickase to polynucleotide encoding the RT of 1:1, 1:2, 1:3, 1:4, 1:5, 1:6, 1:7, 1:8, 1:9, 1:10, 1:11, 1:12, 1:13, 1:14, 1:15, 1:16, 1:17, 1:18, 1:19, 1:20, 1:21, 1:22, 1:23, 1:24, 1:25, 1:26, 1:27, 1:28, 1:29, 1:30, 1:32, 1:34, 1:36, 1:38, or 1:40 or more. In some embodiments, the method includes delivering into the cell a polynucleotide encoding the nickase to polynucleotide encoding the RT, where the polynucleotide encoding the RT is delivered at 1.5 times (1.5×), 2×, 3×, 4×, 5×, 6×, 7×, 8×, 9×, 10×, 20×, 30×, 40×, 50×, 60×, 70×, 80×, 90×, or 100× or more the amount of the nickase polynucleotide.

[0473] In some embodiments, the systems and methods that include delivering of the gene editor polynucleotide supplemented with a polynucleotide encoding a supplemental RT increases integration efficiency of the at least first integration recognition site into the genome of the cell when compared to systems and methods that include delivering to the cell a gene editor polynucleotide not supplemented with a polynucleotide encoding supplemental reverse transcriptase.

### 6.10.3.2 Split Design Plus Further Supplementation

[0474] In some embodiments, the system and methods described herein include supplementation with a polynucleotide encoding a reverse transcriptase, where the system includes a gene editor polynucleotide split over two polynucleotides: a first polynucleotide encoding the nickase and a second polynucleotide encoding the reverse transcriptase. In such cases, the first and second polynucleotides can be delivered to the cell at a ratio of 1:1 and supplementation is achieved by adding a polynucleotide encoding a supplemental reverse transcriptase. In such cases, the supplementation comprises adding the polynucleotide encoding the supplemental reverse transcriptase at a ratio of 1:1, 1:2, 1:3, 1:4, 1:5, 1:6, 1:7, 1:8, 1:9, 1:10, 1:11, 1:12, 1:13, 1:14, 1:15, 1:16, 1:17, 1:18, 1:19, 1:20, 1:21, 1:22, 1:23, 1:24, 1:25, 1:26, 1:27, 1:28, 1:29, 1:30, 1:32, 1:34, 1:36, 1:38, or 1:40 (gene editor polynucleotide (e.g., the first and second polynucleotides delivered to the cell at a ratio of 1:1) to the polynucleotide encoding the supplemental reverse transcriptase).

[0475] In some embodiments, a method of delivering to the cell the one or more atgRNA and the gene editor polynucleotide (where the nickase and the RT are encoded on different polynucleotides and delivered at a ratio 1:1 (nickase to RT)) and supplementing with a polynucleotide encoding a supplemental RT increases integration efficiency of the at least first integration recognition site into the genome of the cell when compared to methods that do not include supplementing with a polynucleotide encoding a supplemental RT.

### 6.10.3.3 Supplementation Via Increase in Ratios when Using Split Design

[0476] In some embodiments, the system and methods described herein include supplementation with a polynucleotide encoding a reverse transcriptase, where the system includes a gene editor polynucleotide split over two polynucleotides: a first polynucleotide encoding the nickase and a second polynucleotide encoding the reverse transcriptase, and supplementation is achieved by increasing the amount of the second polynucleotide encoding the reverse transcriptase.

[0477] In some embodiments, where the gene editor polynucleotide is such that the nucleotide sequence encoding the nickase and the nucleotide sequence encoding the reverse transcriptase are not linked, supplementation of a supplemental reverse transcriptase refers to delivering a greater than 1:1 ratio of nickase to reverse transcriptase (e.g., a 1:2 or greater ratio). In a non-limiting example, the gene editor polynucleotide delivered to the cell in a ratio 1:1, 1:2, 1:3, 1:4, 1:5, 1:6, 1:7, 1:8, 1:9, 1:10, 1:11, 1:12, 1:13, 1:14, 1:15, 1:16, 1:17, 1:18, 1:19, 1:20, 1:21, 1:22, 1:23, 1:24, 1:25, 1:26, 1:27, 1:28, 1:29, 1:30, 1:32, 1:34, 1:36, 1:38, or 1:40 of polynucleotide sequence encoding the nickase to the polynucleotide sequence encoding the reverse transcriptase.

[0478] In some embodiments, a method of delivering to the cell the one or more atgRNA and the gene editor polynucleotide where the nickase and the RT are encoded on different polynucleotides and delivered at a ratio greater than 1:1 (nickase to RT) increases integration efficiency of the at least first integration recognition site into the genome of the cell when compared to methods comprising delivering to the cell a gene editor polynucleotide at a ratio of 1:1 (nickase to RT).

### 6.10.3.4 Supplementation of RT Via Vector Design

[0479] In some embodiments, the system and methods described herein include supplementing with reverse transcriptase, where in supplementing comprises using controllable expression (e.g., inducible promoters, strong promoters) of a polynucleotide encoding a reverse transcriptase.

[0480] In one embodiment, the polynucleotide encoding the nickase and the polynucleotide encoding the RT are on a dual promoter vector, where each polynucleotide is controlled by a different promoter. In a non-limiting example, the polynucleotide encoding the RT is operably linked to a stronger promoter than the polynucleotide encoding the nickase, whereby the RT is expressed at higher levels than the nickase. In another non-limiting example, the polynucleotide encoding the RT is operably linked to an inducible promoter, whereby inducing expression of the RT results in higher levels of the RT compared to the nickase. In another non-limiting example, the polynucleotide encoding the nCas9 is operably linked to an inducible promoter, whereby inducing expressing of the nCas9 results in lower levels of the nCas9 than the RT.

### 6.10.4. Vector

[0481] In some embodiments, the systems and methods described herein include a vector that is capable of co-delivering a template polynucleotide, one or more attachment site-containing gRNA, one or more integrases, one or more recombinases, a gene editor polynucleotide, one or more integration recognition sites, one or more recombinase recognition sites, or a combination thereof.

[0482] Non-limiting examples of vectors that can be used in the methods or systems described herein include the vectors described in FIGS. 3-6.

### 6.10.4.1 AtgRNA and/or ngRNA

[0483] In some embodiments, the vector includes a polynucleotide sequence encoding an attachment site-containing guide RNA (atgRNA). In such embodiments, the polynucleotide sequence encoding the attachment site-containing guide RNA (atgRNA) is operably linked to a regulatory element (e.g., a U6 promoter) that is capable of driving expression of the atgRNA. In such embodiments, the atgRNA comprises (i) a domain that is capable of guiding the prime editor system to a target sequence; and (ii) a reverse transcriptase (RT) template that comprises at least a portion of a first integration recognition site. In some embodiments, where the system, and thereby the vector, include a polynucleotide encoding only a first atgRNA, the RT template comprises the entirety of the first integration recognition site. In such embodiments, the vector or the LNP includes a polynucleotide sequence encoding a nicking gRNA.

[0484] In some embodiments, the vector includes a polynucleotide sequence encoding a first attachment site-containing guide RNA (atgRNA) and a polynucleotide sequence encoding a second attachment site-containing guide RNA (atgRNA). In such embodiments, the first atgRNA and the second atgRNA are an at least first pair of atgRNAs, wherein the at least first pair of atgRNAs have domains that are capable of guiding the prime editor system to a target sequence, the first atgRNA further includes a first RT template that comprises at least a portion of the a first integration recognition site; the second atgRNA further includes a second RT template that comprises at least a portion of the first integration recognition site, and the first atgRNA and the second atgRNAs collectively encode the entirety of the first integration recognition site. In such embodiments, the first atgRNA and second atgRNA include at least a 6 bp overlap.

### 6.10.4.2 Template Polynucleotide

[0485] In typical embodiments, the vector includes a template polynucleotide and a sequence that is an integration cognate of an integration recognition site site-specifically incorporated into the genome of a cell. For example, the vector includes a template polynucleotide and a second integration recognition site that is a cognate pair with the first integration recognition site site-specifically incorporated into the genome of the cell. In such embodiments, the sequence that is an integration cognate (e.g., a second integration recognition site) enables integration of the template polynucleotide or portion thereof when contacted with an integrase and the site-specifically incorporated first integration recognition site.

[0486] In typical embodiments, the vector comprising a template polynucleotide is a recombinant adenovirus, a helper dependent adenovirus, an AAV, a lentivirus, an HSV, an annelovirus, a retrovirus, a Doggybone™ DNA (dbDNA), a minicircle, a plasmid, a miniDNA, an exosome, a fusosome, or an nanoplasmid. In preferred embodiments, the vector is capable of localizing to the nucleus.

[0487] In certain embodiments, the template polynucleotide is delivered to the cytoplasm and localizes to the nucleus. In certain embodiments, the template polynucleotide is delivered to the cytoplasm by LNP. In certain embodiments, the donor template polynucleotide construct comprises a recognition sequence that is recognized by a DNA binding protein (DNA binding domain) or a transcription factor binding domain. In certain embodiments, the donor template polynucleotide construct is delivered to the nucleus by an integrase or recombinase.

[0488] In certain embodiments, the template polynucleotide is delivered to the mitochondria. In certain embodiments, the donor template polynucleotide construct comprises a mitochondria targeting sequence.

[0489] In certain embodiments, the vector comprising a template polynucleotide is AAV. In some embodiments, the AAV contains a 5′ inverted terminal repeat (ITR). In some embodiments, the AAV contains a 3′ inverted terminal repeat (ITR). In some embodiments, the AAV contains a 5′ and a 3′ ITR. In some embodiments, the 5′ and 3′ ITR are not derived from the same serotype of virus. In some embodiments, the ITRs are derived from adenovirus, AAV2, and/or AAV5.

[0490] In certain embodiments, the vector comprising a template polynucleotide is single stranded AAV (ssAAV). In certain embodiments, the vector comprising a donor template polynucleotide construct is self-complementary AAV (scAAV).

[0491] In some embodiments, a vector comprises an attachment site-containing guideRNA (atgRNA), a nicking-guideRNA (ngRNA), and template polynucleotide. In typical embodiments, the vector comprising an attachment site-containing guideRNA (atgRNA), a nicking-guideRNA (ngRNA), and template polynucleotide is recombinant adenovirus, helper dependent adenovirus, AAV, lentivirus, HSV, annelovirus, retrovirus, Doggybone™ DNA (dbDNA), minicircle, plasmid, miniDNA, exosome, fusosome, or nanoplasmid. In preferred embodiments, the vector is capable of localizing to the nucleus. In typical embodiments, the attachment site-containing guideRNA (atgRNA) sequence and the nicking-guideRNA (ngRNA) sequence contain a terminal poly dT.

[0492] In some embodiments, a vector comprises an attachment site-containing guideRNA (atgRNA), and donor template. In typical embodiments, the vector comprising an attachment site-containing guideRNA (atgRNA) and donor template is recombinant adenovirus, helper dependent adenovirus, AAV, lentivirus, HSV, annelovirus, retrovirus, Doggybone™ DNA (dbDNA), minicircle, plasmid, miniDNA, exosome, fusosome, or nanoplasmid. In preferred embodiments, the vector is capable of localizing to the nucleus. In typical embodiments, the attachment site-containing guideRNA (atgRNA) sequence contain a terminal poly dT.

[0493] In typical embodiments, the template polynucleotide is capable of being integrated into a genomic locus that contains an integrase target recognition site or a recombinase target recognition site.

[0494] In certain embodiments, the template polynucleotide comprises at least one of the following: a gene, a gene fragment, an expression cassette, a logic gate system, or any combination thereof. In some embodiments, the template polynucleotide comprises at least one intron or exon.

[0495] In typical embodiments, the template polynucleotide further comprises at least one integrase target recognition site or a recombinase target integrase site. In certain embodiments, at least one integrase target recognition site or a recombinase target integrase site is placed within the donor template vector inverted terminal repeat.

### 6.10.4.3 Integrase- or Recombinase-Mediated Self-Circularization of a Subsequence of a Vector Delivered as Part of the Co-Delivery System

[0496] In some embodiments, the delivery system (e.g., co-delivery system) includes a vector having a sub-sequence that is capable of self-circularizing to form a self-circular nucleic acid. In some embodiments, the vector comprises a physical portion or region of the vector that is capable of self-circularizing to form a circular construct. As used herein, the term “sub-sequence” refers to a portion of the vector that is capable of self-circularizing, where the sub-sequence is flanked by integration recognition sites or recombinase recognition sites positioned to enable self-circularization. As used herein, the term “self-circular nucleic acid” refers to a double-stranded, circular nucleic acid construct produced as a result of recombination of a cognate pair of integrase or recombinase recognition sites present on the vector. Recombination occurs when the vector is contacted with an integrase or a recombinase under conditions that allow for recombination of the cognate pair of integrase or recombinase recognition sites.

[0497] In some embodiments, the sub-sequence of the vector includes a first recombinase recognition site and a second recombinase recognition site, wherein the first and second recombinase recognition sites are capable of being recombined by a recombinase. In some embodiments, the sub-sequence of the vector includes a first recombinase recognition site, a second recombinase recognition site, and a second integration recognition site (e.g., the second integration recognition site is a cognate pair of the first integration recognition site), where the first and second recombinase recognition sites flank the integration recognition site. In such cases, the first recombinase recognition site, the second recombinase recognition, and a recombinase enable the self-circularizing and formation of the circular construct.

[0498] In some embodiments, the sub-sequence of the vector includes a third integration recognition site and a fourth integration recognition site, wherein the third and fourth integration recognition sites are a cognate pair. In some embodiments, the subsequence of the vector includes the second integration recognition site, the third integration recognition site, the fourth integration recognition site, where the third and fourth integration recognition sites flank the second integration recognition site (where the second integration recognition site is a cognate pair of the first integration recognition site). In such cases, the third integration recognition site, the fourth integration recognition site, and an integrase enable self-circularization and formation of the circular construct. In such cases, the third integration recognition site and/or the fourth integration recognition sites cannot recombine with the first integration recognition site and/or the second integration recognition site due, in part, to having different central dinucleotides than the first and second integration recognition sites.

[0499] In some embodiments where the subsequence includes three or more integration recognition sites, each integration recognition site or each pair of integration recognition is capable of being recognized by a different integrase. In some embodiments where the subsequence includes three or more integration recognition sites, each integration recognition site or each pair of integration recognition comprises a different central dinucleotide.

[0500] In some embodiments, self-circularizing is mediated at the integration recognition sites or recombinase recognition sites. In some embodiments, the self-circularizing is mediated by an integrase or a recombinase.

[0501] In some embodiments, upon introducing the vector into a cell and after self-circularizing to form the self-circular nucleic acid, the self-circular nucleic acid comprising the second integration recognition site is capable of being integrated into the cell's genome at the target sequence that contains the first integration recognition site.

[0502] In some embodiments, following self-circularization, the self-circular nucleic acid comprises one or more additional integration recognition sites that enable integration of an additional nucleic acid cargo. In such cases, the additional nucleic acid cargo includes a sequence that is a cognate pair with one or more of the additional integration recognition sites in the self-circular nucleic acid. For example, integration of the self-circular nucleic acid into the genome of a cell results in integration of the one or more additional integration recognition sites into the genome along with the nucleic acid cargo. The integrated one or more additional integration recognition sites serve as an integration recognition site (beacon) for placing the additional nucleic acid cargo. Upon contacting the cell harboring the integrated nucleic acid cargo and the one or more additional integration recognition sites with an integrase and the second additional nucleic acid cargo that includes a sequence that is an integration cognate to the one or more additional integration recognition sites the additional nucleic acid cargo is integrated into the cell's genome.

[0503] In typical embodiments, the self-circularized nucleic acid comprises a DNA cargo. embodiments, the DNA cargo is a gene or gene fragment. In some embodiments the DNA cargo is an expression cassette. In some embodiments, the DNA cargo is a logic gate or logic gate system. The logic gate or logic gate system may be DNA based, RNA based, protein based, or a mix of DNA, RNA, and protein. In some embodiments, the nucleic acid cargo is a genetic, protein, or peptide tag and/or barcode.

### 6.10.4.4 A Second Vector

[0504] In some embodiments, the system or methods described herein include a second vector. In some embodiments, where the gene editor polynucleotide encodes a prime editor system comprising a nickase (e.g., any of the Cas proteins or variants thereof (e.g., nickases) and nickases described herein, see Tables 4-8) and a reverse transcriptase (e.g., any of the reverse transcriptase described herein), the second vector comprises a polynucleotide sequence encoding an integrase (e.g., any of the integrases described herein, e.g., as described in Table 10 and also in Yamall et al., Nat. Biotechnol., 2022, doi.org/10.1038/s41587-022-01527-4 and Durrant et al., Nat. Biotechnol., 2022, doi.org/10.1038/s41587-022-01494-w, each of which are herein incorporated by reference in their entireties).

[0505] In some embodiments, where the gene editor polynucleotide encodes a prime editor system comprising a nickase and a reverse transcriptase, the second vector comprises a polynucleotide sequence encoding at least a first recombinase. In some embodiments, where the gene editor polynucleotide encodes a prime editor system comprising a nickase, a reverse transcriptase, and an integrase, the second vector comprises a polynucleotide sequence encoding at least a first recombinase. In some embodiments, where the gene editor polynucleotide encodes a prime editor system comprising a nickase, a reverse transcriptase, and an integrase, the second vector comprises a polynucleotide sequence encoding at least a second integrase.

[0506] In some embodiments, the second vector includes a template polynucleotide and a sequence that is an integration cognate of an integration recognition site site-specifically incorporated into the genome of a cell. For example, the second vector includes a template polynucleotide and a second integration recognition site that is a cognate pair with the first integration recognition site site-specifically incorporated into the genome of the cell. In such embodiments, the sequence that is an integration cognate (e.g., a second integration recognition site) enables integration of the template polynucleotide or portion thereof when contacted with an integrase and the site-specifically incorporated first integration recognition site.

[0507] In some embodiments, the second vector is a vector selected from: adenovirus, AAV, lentivirus, HSV, annelovirus, retrovirus, Doggybone™ DNA (dbDNA), minicircle, plasmid, miniDNA, exosome, fusosome, or nanoplasmid.

[0508] In some embodiments, the polynucleotide sequence encoding the prime editor system is encoded on at least two different vectors. In one embodiment, a first vector comprises a polynucleotide sequence encoding a nickase and a second vector comprises a polynucleotide sequence encoding a reverse transcriptase. In such cases, the first vector and second are delivered concurrently.

[0509] In some embodiments, the polynucleotide sequence(s) encoding the prime editor system is encoded on at least two (non-contiguous) polynucleotide sequences. In one embodiment, a first polynucleotide sequence encodes a nickase and a second polynucleotide sequence encodes a reverse transcriptase. In such cases, the first vector and second are delivered concurrently (e.g., in a first LNP).

### 6.10.5. Split Lipid Nanoparticles (LNPs)

[0510] Also provided herein are methods of co-delivering a system capable of site-specifically integrating at least a first integration recognition site into the genome of a cell, where the method includes delivering to a cell a mixture of a first LNP and a second LNP (“split LNPs”). In one embodiment, the method includes co-delivering to a cell a first gene editor polynucleotide construct and a first attachment site-containing guide RNA (atgRNA) are packaged, and thereby vectorized, within the first LNP, and a second gene editor polynucleotide construct and a second attachment site containing guide RNR (atgRNA) are packaged, and thereby vectorized, within the second LNP, where the first atgRNA and the second atgRNA are an at least first pair of atgRNA. The at least first pair of atgRNAs comprise domains that are capable of guiding the prime editor system to a target sequence. The first atgRNA further includes a first RT template that comprises at least a portion of a first integration recognition site. The second atgRNA further includes a second RT template that comprises at least a portion of the first integration recognition site. The first atgRNA and the second atgRNAs collectively encode the entirety of the first integration recognition site. In such embodiments, the first atgRNA and second atgRNA include at least a 6 bp overlap.

[0511] In some embodiments, where the method includes delivering a first LNP (e.g., a first LNP comprising a first gene editor polynucleotide construct and a first atgRNA) and a second LNP (e.g., a second LNP comprising a second gene editor polynucleotide construct and a second atgRNA), the first LNP and the second LNP are mixed prior to delivering to a cell. In some embodiments, the first LNP and the second LNP are mixed at a ratio of first LNP to second LNP of 1:10, 1:9, 1:8, 1:7, 1:6, 1:5, 1:4, 1:3, 1:2, 1:1, 1:0.75, 0.75:1, 2:1, 3:1, 4:1, 5:1, 6:1, 7:1, 8:1, 9:1, or 10:1. In some embodiments, the first LNP and the second LNP are mixed at a ratio of 1:1.

[0512] In some embodiments, a first LNP comprising a first gene editor polynucleotide construct and a first attachment site-containing guide RNA (atgRNA1) comprises a ratio of ratio of gene editor polynucleotide construct (e.g., mRNA) to atgRNA1 of 1:10, 1:9, 1:8, 1:7, 1:6, 1:5, 1:4, 1:3, 1:2, 1:1, 1:0.75, 0.75:1, 2:1, 3:1, 4:1, 5:1, 6:1, 7:1, 8:1, 9:1, or 10:1. In some embodiments, the first LNP comprises a ratio of mRNA to atgRNA1 of 2:1.

[0513] In some embodiments, a second LNP comprising a second gene editor polynucleotide construct and a second attachment site-containing guide RNA (atgRNA2) comprises a ratio of gene editor polynucleotide construct (e.g., mRNA) to atgRNA2 of 1:10, 1:9, 1:8, 1:7, 1:6, 1:5, 1:4, 1:3, 1:2, 1:1, 1:0.75, 0.75:1, 2:1, 3:1, 4:1, 5:1, 6:1, 7:1, 8:1, 9:1, or 10:1. In some embodiments, the second LNP comprises a ratio of mRNA to atgRNA2 of 2:1.

[0514] In some embodiments, where the method includes delivering a first LNP (e.g., a first LNP comprising a first gene editor polynucleotide construct and a first atgRNA) and a second LNP (e.g., a second LNP comprising a second gene editor polynucleotide construct and a second atgRNA), the first LNP and the second LNP are mixed such that the ratio of gene editor polynucleotide construct (e.g., mRNA) to first atgRNA (atgRNA1) to second atgRNA (atgRNA2) is 1:0.25:0.25, 1:0.5:0.5, 1:0.75:0.75, or 1:1:1.

[0515] In some embodiments, the method of co-delivering to a cell a mixture of LNPs includes co-delivering three or more LNPs, four or more LNPs, five or more LNPs, six or more LNPs, seven or more LNPs, eight or more LNPs, nine or more LNPs, or ten or more LNPs.

[0516] Also provided herein is a system capable of site-specifically integrating at least a first integration recognition site into the genome of a cell, the system comprising: a first gene editor polynucleotide construct and a first attachment site-containing guide RNA (atgRNA) are packaged, and thereby vectorized, within the first LNP, and a second gene editor polynucleotide construct and a second attachment site containing guide RNR (atgRNA) are packaged, and thereby vectorized, within the second LNP, where the first atgRNA and the second atgRNA are an at least first pair of atgRNA. The at least first pair of atgRNAs comprise domains that are capable of guiding the prime editor system to a target sequence. The first atgRNA further includes a first RT template that comprises at least a portion of a first integration recognition site. The second atgRNA further includes a second RT template that comprises at least a portion of the first integration recognition site. The first atgRNA and the second atgRNAs collectively encode the entirety of the first integration recognition site. In such embodiments, the first atgRNA and second atgRNA include at least a 6 bp overlap.

[0517] In some embodiments, the system comprises a first LNP (e.g., any of the first LNPs described herein) and a second LNP (e.g., any of the second LNPs described herein) at a ratio of first LNP to second LNP of 1:10, 1:9, 1:8, 1:7, 1:6, 1:5, 1:4, 1:3, 1:2, 1:1, 1:0.75, 0.75:1, 2:1, 3:1, 4:1, 5:1, 6:1, 7:1, 8:1, 9:1, or 10:1. In some embodiments, the system comprise the first LNP and the second LNP at a ratio of 1:1.

[0518] In some embodiments, the system comprises a first LNP having a ratio of a first gene editor polynucleotide construct to a first attachment site-containing guide RNA (atgRNA1) of 1:10, 1:9, 1:8, 1:7, 1:6, 1:5, 1:4, 1:3, 1:2, 1:1, 1:0.75, 0.75:1, 2:1, 3:1, 4:1, 5:1, 6:1, 7:1, 8:1, 9:1, or 10:1. In some embodiments, the system includes a first LNP having a ratio of mRNA (i.e., mRNA encoding the gene editor protein) to atgRNA1 of 2:1.

[0519] In some embodiments, the system comprise a second LNP having a ratio of a second gene editor polynucleotide construct to a second attachment site-containing guide RNA (atgRNA2) of 1:10, 1:9, 1:8, 1:7, 1:6, 1:5, 1:4, 1:3, 1:2, 1:1, 1:0.75, 0.75:1, 2:1, 3:1, 4:1, 5:1, 6:1, 7:1, 8:1, 9:1, or 10:1. In some embodiments, the system includes a second LNP having a ratio of mRNA (i.e., mRNA encoding the gene editor protein) to atgRNA2 of 2:1.

[0520] In some embodiments, the system comprises a ratio of gene editor polynucleotide construct (e.g., mRNA encoding the gene editor protein) to first atgRNA (atgRNA1) to second atgRNA (atgRNA2) of 1:0.25:0.25, 1:0.5:0.5, 1:0.75:0.75, or 1:1:1.

[0521] In some embodiments, the system comprises a mixture of LNPs comprising three or more LNPs, four or more LNPs, five or more LNPs, six or more LNPs, seven or more LNPs, eight or more LNPs, nine or more LNPs, or ten or more LNPs.

[0522] In some embodiments, where a split LNP (e.g., a mixture of two LNPs packaged with different cargo) is being used to site-specifically integrate the at least first integration recognition site into the genome, a vector comprising a template polynucleotide and a sequence that is an integration cognate (i.e., cognate to an integration recognition site site-specifically incorporated into the genome of a cell) can be delivered to the cell concurrently with the split LNPs or after delivery of the split LNPs. For example, after delivering the split LNPs to the cell, a vector that includes a template polynucleotide and a second integration recognition site that is a cognate pair with the first integration recognition site is delivered to the cell. In such embodiments, the sequence that is an integration cognate (e.g., a second integration recognition site) enables integration of the template polynucleotide or portion thereof when contacted with an integrase and the site-specifically incorporated first integration recognition site.

### 6.10.6. Vector Delivery of a Template Polynucleotide

[0523] In certain aspects the invention involves vectors, e.g. for delivering or introducing in a cell, but also for propagating these components (e.g. in prokaryotic cells). A used herein, a “vector” is a tool that allows or facilitates the transfer of an entity from one environment to another. It is a replicon, such as a plasmid, phage, or cosmid, into which another DNA segment may be inserted so as to bring about the replication of the inserted segment. Generally, a vector is capable of replication when associated with the proper control elements. In general, the term “vector” refers to a nucleic acid molecule capable of transporting another nucleic acid to which it has been linked. Vectors include, but are not limited to, nucleic acid molecules that are single-stranded, double-stranded, or partially double-stranded; nucleic acid molecules that comprise one or more free ends, no free ends (e.g. circular); nucleic acid molecules that comprise DNA, RNA, or both; and other varieties of polynucleotides known in the art. One type of vector is a “plasmid,” which refers to a circular double stranded DNA loop into which additional DNA segments can be inserted, such as by standard molecular cloning techniques. Another type of vector is a viral vector, wherein virally-derived DNA or RNA sequences are present in the vector for packaging into a virus (e.g. retroviruses, replication defective retroviruses, adenoviruses, replication defective adenoviruses, and adeno-associated viruses (AAVs)). Viral vectors also include polynucleotides carried by a virus for transfection into a host cell. Certain vectors are capable of autonomous replication in a host cell into which they are introduced (e.g. bacterial vectors having a bacterial origin of replication and episomal mammalian vectors). Other vectors (e.g., non-episomal mammalian vectors) are integrated into the genome of a host cell upon introduction into the host cell, and thereby are replicated along with the host genome. Moreover, certain vectors are capable of directing the expression of genes to which they are operatively-linked. Such vectors are referred to herein as “expression vectors.” Vectors for and that result in expression in a eukaryotic cell can be referred to herein as “eukaryotic expression vectors.” Common expression vectors of utility in recombinant DNA techniques are often in the form of plasmids.

[0524] Recombinant expression vectors can comprise a nucleic acid of the invention in a form suitable for expression of the nucleic acid in a host cell, which means that the recombinant expression vectors include one or more regulatory elements, which may be selected on the basis of the host cells to be used for expression, that is operatively-linked to the nucleic acid sequence to be expressed. Within a recombinant expression vector, “operably linked” is intended to mean that the nucleotide sequence of interest is linked to the regulatory element(s) in a manner that allows for expression of the nucleotide sequence (e.g. in an in vitro transcription/translation system or in a host cell when the vector is introduced into the host cell). With regards to recombination and cloning methods, mention is made of U.S. patent application Ser. No. 10/815,730, published Sep. 2, 2004, as US 2004-0171156 A1, the contents of which are herein incorporated by reference in their entirety.

[0525] Vector delivery, e.g., plasmid, viral delivery: The CRISPR enzyme, for instance a Type V protein such as C2c1 or C2c3, and/or any of the present RNAs, for instance a guide RNA, can be delivered using any suitable vector, e.g., plasmid or viral vectors, such as adeno associated virus (AAV), lentivirus, adenovirus or other viral vector types, or combinations thereof. Effector proteins and one or more guide RNAs can be packaged into one or more vectors, e.g., plasmid or viral vectors. In some embodiments, the vector, e.g., plasmid or viral vector is delivered to the tissue of interest by, for example, an intramuscular injection, while other times the delivery is via intravenous, transdermal, intranasal, oral, mucosal, or other delivery methods. Such delivery may be either via a single dose, or multiple doses. One skilled in the art understands that the actual dosage to be delivered herein may vary greatly depending upon a variety of factors, such as the vector choice, the target cell, organism, or tissue, the general condition of the subject to be treated, the degree of transformation/modification sought, the administration route, the administration mode, the type of transformation/modification sought, etc.

[0526] Such a dosage may further contain, for example, a carrier (water, saline, ethanol, glycerol, lactose, sucrose, calcium phosphate, gelatin, dextran, agar, pectin, peanut oil, sesame oil, etc.), a diluent, a pharmaceutically-acceptable carrier (e.g., phosphate-buffered saline), a pharmaceutically-acceptable excipient, and/or other compounds known in the art. The dosage may further contain one or more pharmaceutically acceptable salts such as, for example, a mineral acid salt such as a hydrochloride, a hydrobromide, a phosphate, a sulfate, etc.; and the salts of organic acids such as acetates, propionates, malonates, benzoates, etc. Additionally, auxiliary substances, such as wetting or emulsifying agents, pH buffering substances, gels or gelling materials, flavorings, colorants, microspheres, polymers, suspension agents, etc. may also be present herein. In addition, one or more other conventional pharmaceutical ingredients, such as preservatives, humectants, suspending agents, surfactants, antioxidants, anticaking agents, fillers, chelating agents, coating agents, chemical stabilizers, etc. may also be present, especially if the dosage form is a reconstitutable form. Suitable exemplary ingredients include microcrystalline cellulose, carboxymethylcellulose sodium, polysorbate 80, phenylethyl alcohol, chlorobutanol, potassium sorbate, sorbic acid, sulfur dioxide, propyl gallate, the parabens, ethyl vanillin, glycerin, phenol, parachlorophenol, gelatin, albumin and a combination thereof. A thorough discussion of pharmaceutically acceptable excipients is available in REMINGTON'S PHARMACEUTICAL SCIENCES (Mack Pub. Co., N.J. 1991) which is incorporated by reference herein.

[0527] In an embodiment herein the delivery is via an adenovirus, which may be at a single booster dose containing at least 1×10⁵ particles (also referred to as particle units, pu) of adenoviral vector. In an embodiment herein, the dose preferably is at least about 1×10⁶ particles (for example, about 1×10⁶-1×10¹¹ particles), more preferably at least about 1×10⁷ particles, more preferably at least about 1×10⁸ particles (e.g., about 1×10⁸-1×10¹¹ particles or about 1×10⁹-1×10¹² particles), and most preferably at least about 1×10¹⁰ particles (e.g., about 1×10⁹-1×10¹⁰ particles or about 1×10⁹-1×10¹² particles), or even at least about 1×10¹⁰ particles (e.g., about 1×10¹⁰-1×10¹² particles) of the adenoviral vector. Alternatively, the dose comprises no more than about 1×10¹⁴ particles, preferably no more than about 1×10¹³ particles, even more preferably no more than about 1×10¹² particles, even more preferably no more than about 1×10¹¹ particles, and most preferably no more than about 1×10¹⁰ particles (e.g., no more than about 1×10⁹ particles). Thus, the dose may contain a single dose of adenoviral vector with, for example, about 1×10⁶ particle units (pu), about 2×10⁶ pu, about 4×10⁶ pu, about 1×10⁷ pu, about 2×10⁷ pu, about 4×10⁷ pu, about 1×10⁸ pu, about 2×10⁸ pu, about 4×10⁸ pu, about 1×10⁹ pu, about 2×10⁹ pu, about 4×10⁹ pu, about 1×10¹⁰ pu, about 2×10¹⁰ pu, about 4×10¹⁰ pu, about 1×10¹¹ pu, about 2×10¹¹ pu, about 4×10¹¹ pu, about 1×10¹² pu, about 2×10¹² pu, or about 4×10¹² pu of adenoviral vector. See, for example, the adenoviral vectors in U.S. Pat. No. 8,454,972 B2 to Nabel, et. al., granted on Jun. 4, 2013; incorporated by reference herein, and the dosages at col 29, lines 36-58 thereof. In an embodiment herein, the adenovirus is delivered via multiple doses.

[0528] In an embodiment herein, the delivery is via an AAV. A therapeutically effective dosage for in vivo delivery of the AAV to a human is believed to be in the range of from about 20 to about 50 ml of saline solution containing from about 1×10¹⁰ to about 1×10⁵⁰ functional AAV/ml solution. The dosage may be adjusted to balance the therapeutic benefit against any side effects. In an embodiment herein, the AAV dose is generally in the range of concentrations of from about 1×10⁵ to 1×10⁵⁰ genomes AAV (sometimes referred to herein as “vector genomes” or “vg”), from about 1×10⁸ to 1×10²⁰ genomes AAV, from about 1×10¹⁰ to about 1×10¹⁶ genomes, or about 1×10¹¹ to about 1×10¹⁶ genomes AAV. A human dosage may be about 1×10¹³ genomes AAV. Such concentrations may be delivered in from about 0.001 ml to about 100 ml, about 0.05 to about 50 ml, or about 10 to about 25 ml of a carrier solution. Other effective dosages can be readily established by one of ordinary skill in the art through routine trials establishing dose response curves. See, for example, U.S. Pat. No. 8,404,658 B2 to Hajjar, et al., granted on Mar. 26, 2013, at col. 27, lines 45-60.

[0529] The promoter used to drive nucleic acid-targeting effector protein coding nucleic acid molecule expression can include: AAV ITR can serve as a promoter: this is advantageous for eliminating the need for an additional promoter element (which can take up space in the vector). The additional space freed up can be used to drive the expression of additional elements (gRNA, etc.). Also, ITR activity is relatively weaker, so can be used to reduce potential toxicity due to over expression of nucleic acid-targeting effector protein. For ubiquitous expression, can use promoters: CMV, CAG, CBh, PGK, SV40, Ferritin heavy or light chains, etc. For brain or other CNS expression, can use promoters: SynapsinI for all neurons, CaMKIIalpha for excitatory neurons, GAD67 or GAD65 or VGAT for GABAergic neurons, etc. For liver expression, can use Albumin promoter. For lung expression, can use SP-B. For endothelial cells, can use ICAM. For hematopoietic cells can use IFNbeta or CD45. For Osteoblasts can use OG-2.

[0530] The promoter used to drive guide RNA can include: Pol III promoters such as U6 or H1 Use of Pol II promoter and intronic cassettes to express guide RNA Adeno Associated Virus (AAV).

[0531] Nucleic acid-targeting effector protein and one or more guide RNA can be delivered using adeno associated virus (AAV), lentivirus, adenovirus or other plasmid or viral vector types, in particular, using formulations and doses from, for example, U.S. Pat. No. 8,454,972 (formulations, doses for adenovirus), U.S. Pat. No. 8,404,658 (formulations, doses for AAV) and U.S. Pat. No. 5,846,946 (formulations, doses for DNA plasmids) and from clinical trials and publications regarding the clinical trials involving lentivirus, AAV and adenovirus. For examples, for AAV, the route of administration, formulation and dose can be as in U.S. Pat. No. 8,454,972 and as in clinical trials involving AAV. For Adenovirus, the route of administration, formulation and dose can be as in U.S. Pat. No. 8,404,658 and as in clinical trials involving adenovirus. For plasmid delivery, the route of administration, formulation and dose can be as in U.S. Pat. No. 5,846,946 and as in clinical studies involving plasmids. Doses may be based on or extrapolated to an average 70 kg individual (e.g., a male adult human), and can be adjusted for patients, subjects, mammals of different weight and species. Frequency of administration is within the ambit of the medical or veterinary practitioner (e.g., physician, veterinarian), depending on usual factors including the age, sex, general health, other conditions of the patient or subject and the particular condition or symptoms being addressed. The viral vectors can be injected into the tissue of interest. For cell-type specific genome modification, the expression of nucleic acid-targeting effector can be driven by a cell-type specific promoter. For example, liver-specific expression might use the Albumin promoter and neuron-specific expression (e.g., for targeting CNS disorders) might use the Synapsin I promoter.

[0532] In terms of in vivo delivery, AAV is advantageous over other viral vectors for a couple of reasons: Low toxicity (this may be due to the purification method not requiring ultra centrifugation of cell particles that can activate the immune response) and Low probability of causing insertional mutagenesis because it doesn't integrate into the host genome.

[0533] AAV has a packaging limit of 4.5 or 4.75 Kb. This means that nucleic acid-targeting effector protein (such as a Type V protein such as C2c1 or C2c3) as well as a promoter and transcription terminator have to be all fit into the same viral vector. Therefore embodiments of the invention include utilizing homologs of nucleic acid-targeting effector protein (such as a Type V protein such as C2c1 or C2c3) that are shorter.

[0534] As to AAV, the AAV can be AAV1, AAV2, AAV5 or any combination thereof. One can select the AAV of the AAV with regard to the cells to be targeted; e.g., one can select AAV serotypes 1, 2, 5 or a hybrid capsid AAV1, AAV2, AAV5 or any combination thereof for targeting brain or neuronal cells; and one can select AAV4 for targeting cardiac tissue. AAV8 is useful for delivery to the liver. The herein promoters and vectors are preferred individually.

[0535] Packaging cells are typically used to form virus particles that are capable of infecting a host cell. Such cells include 293 cells, which package adenovirus, and psi2 cells or PA317 cells, which package retrovirus. Viral vectors used in gene therapy are usually generated by producing a cell line that packages a nucleic acid vector into a viral particle. The vectors typically contain the minimal viral sequences required for packaging and subsequent integration into a host, other viral sequences being replaced by an expression cassette for the polynucleotide(s) to be expressed. The missing viral functions are typically supplied in trans by the packaging cell line. For example, AAV vectors used in gene therapy typically only possess ITR sequences from the AAV genome which are required for packaging and integration into the host genome. Viral DNA is packaged in a cell line, which contains a helper plasmid encoding the other AAV genes, namely rep and cap, but lacking ITR sequences. The cell line may also be infected with adenovirus as a helper. The helper virus promotes replication of the AAV vector and expression of AAV genes from the helper plasmid. The helper plasmid is not packaged in significant amounts due to a lack of ITR sequences. Contamination with adenovirus can be reduced by, e.g., heat treatment to which adenovirus is more sensitive than AAV. Additional methods for the delivery of nucleic acids to cells are known to those skilled in the art. See, for example, US20030087817, incorporated herein by reference.

[0536] Millington-Ward et al. (Molecular Therapy, vol. 19 no. 4, 642-649 April 2011) describes adeno-associated virus (AAV) vectors to deliver an RNA interference (RNAi)-based rhodopsin suppressor and a codon-modified rhodopsin replacement gene resistant to suppression due to nucleotide alterations at degenerate positions over the RNAi target site. An injection of either 6.0×10⁸ vp or 1.8×10¹⁰ vp AAV were subretinally injected into the eyes by Millington-Ward et al. The AAV vectors of Millington-Ward et al. may be applied to the system of the present invention, contemplating a dose of about 2×10¹¹ to about 6×10¹¹ vp administered to a human.

[0537] Dalkara et al. (Sci Transl Med 5, 189ra76 (2013)) also relates to in vivo directed evolution to fashion an AAV vector that delivers wild-type versions of defective genes throughout the retina after noninjurious injection into the eyes' vitreous humor. Dalkara describes a 7 mer peptide display library and an AAV library constructed by DNA shuffling of cap genes from AAV1, 2, 4, 5, 6, 8, and 9. The rcAAV libraries and rAAV vectors expressing GFP under a CAG or Rho promoter were packaged and deoxyribonuclease-resistant genomic titers were obtained through quantitative PCR. The libraries were pooled, and two rounds of evolution were performed, each consisting of initial library diversification followed by three in vivo selection steps. In each such step, P30 rho-GFP mice were intravitreally injected with 2 ml of iodixanol-purified, phosphate-buffered saline (PBS)-dialyzed library with a genomic titer of about 1.times.10.sup.12 vg/ml. The AAV vectors of Dalkara et al. may be applied to the nucleic acid-targeting system of the present invention, contemplating a dose of about 1×10¹⁵ to about 1×10¹⁶ vg/ml administered to a human.

[0538] The tropism of a retrovirus can be altered by incorporating foreign envelope proteins, expanding the potential target population of target cells. Lentiviral vectors are retroviral vectors that are able to transduce or infect non-dividing cells and typically produce high viral titers. Selection of a retroviral gene transfer system would therefore depend on the target tissue. Retroviral vectors are comprised of cis-acting long terminal repeats with packaging capacity for up to 6-10 kb of foreign sequence. The minimum cis-acting LTRs are sufficient for replication and packaging of the vectors, which are then used to integrate the therapeutic gene into the target cell to provide permanent transgene expression. Widely used retroviral vectors include those based upon murine leukemia virus (MuLV), gibbon ape leukemia virus (GaLV), Simian Immuno deficiency virus (SW), human immuno deficiency virus (HIV), and combinations thereof (see, e.g., Buchscher et al., J. Virol. 66:2731-2739 (1992); Johann et al., J. Virol. 66:1635-1640 (1992); Sommnerfelt et al., Virol. 176:58-59 (1990); Wilson et al., J. Virol. 63:2374-2378 (1989); Miller et al., J. Virol. 65:2220-2224 (1991); PCT/US94/05700). In applications where transient expression is preferred, adenoviral based systems may be used. Adenoviral based vectors are capable of very high transduction efficiency in many cell types and do not require cell division. With such vectors, high titer and levels of expression have been obtained. This vector can be produced in large quantities in a relatively simple system. Adeno-associated virus (“AAV”) vectors may also be used to transduce cells with target nucleic acids, e.g., in the in vitro production of nucleic acids and peptides, and for in vivo and ex vivo gene therapy procedures (see, e.g., West et al., Virology 160:38-47 (1987); U.S. Pat. No. 4,797,368; WO 93/24641; Kotin, Human Gene Therapy 5:793-801 (1994); Muzyczka, J. Clin. Invest. 94:1351 (1994). Construction of recombinant AAV vectors are described in a number of publications, including U.S. Pat. No. 5,173,414; Tratschin et al., Mol. Cell. Biol. 5:3251-3260 (1985); Tratschin, et al., Mol. Cell. Biol. 4:2072-2081 (1984); Hermonat & Muzyczka, PNAS 81:6466-6470 (1984); and Samulski et al., J. Virol. 63:03822-3828 (1989).

[0539] Packaging cells are typically used to form virus particles that are capable of infecting a host cell. Such cells include 293 cells, which package adenovirus, and yr2 cells or PA317 cells, which package retrovirus. Viral vectors used in gene therapy are usually generated by producing a cell line that packages a nucleic acid vector into a viral particle. The vectors typically contain the minimal viral sequences required for packaging and subsequent integration into a host, other viral sequences being replaced by an expression cassette for the polynucleotide(s) to be expressed. The missing viral functions are typically supplied in trans by the packaging cell line. For example, AAV vectors used in gene therapy typically only possess ITR sequences from the AAV genome which are required for packaging and integration into the host genome. Viral DNA is packaged in a cell line, which contains a helper plasmid encoding the other AAV genes, namely rep and cap, but lacking ITR sequences. The cell line may also be infected with adenovirus as a helper. The helper virus promotes replication of the AAV vector and expression of AAV genes from the helper plasmid. The helper plasmid is not packaged in significant amounts due to a lack of ITR sequences. Contamination with adenovirus can be reduced by, e.g., heat treatment to which adenovirus is more sensitive than AAV. Additional methods for the delivery of nucleic acids to cells are known to those skilled in the art. See, for example, US20030087817, incorporated herein by reference.

[0540] In some embodiments, a host cell is transiently or non-transiently transfected with one or more vectors described herein. In some embodiments, a cell is transfected as it naturally occurs in a subject. In some embodiments, a cell that is transfected is taken from a subject. Cells taken from a subject include, but are not limited to, hepatocytes or cells isolated from muscle, the CNS, eye or lung. Immunological cells are also contemplated, such as but not limited to T cells, HSCs, B-cells and NK cells.

[0541] Another useful method to deliver proteins, enzymes, and guides comprises transfection of messenger RNA (mRNA). Examples of mRNA delivery methods and compositions that may be utilized in the present disclosure including, for example, PCT/US2014/028330, U.S. Pat. No. 8,822,663B2, NZ700688A, ES2740248T3, EP2755693A4, EP2755986A4, WO2014152940A1, EP3450553B1, BR112016030852A2, and EP3362461A1. Expression of CRISPR systems in particular is described by WO2020014577. Each of these publications are incorporated herein by reference in their entireties. Additional disclosure hereby incorporated by reference can be found in Kowalski et al., “Delivering the Messenger: Advances in Technologies for Therapeutic mRNA Delivery,” Mol Therap., 2019; 27(4): 710-728.

[0542] In some embodiments, the cell is derived from cells taken from a subject, such as a cell line. A wide variety of cell lines for tissue culture are known in the art. Examples of cell lines include, but are not limited to, C8161, CCRF-CEM, MOLT, mIMCD-3, NHDF, HeLa-S3, Huh1, Huh4, Huh7, HUVEC, HASMC, HEKn, HEKa, MiaPaCell, Panc1, PC-3, TF1, CTLL-2, CIR, Rat6, CV1, RPTE, A10, T24, J82, A375, ARH-77, Calu1, SW480, SW620, SKOV3, SK-UT, CaCo2, P388D1, SEM-K2, WEHI-231, HB56, TIB55, Jurkat, J45.01, LRMB, Bcl-1, BC-3, IC21, DLD2, Raw264.7, NRK, NRK-52E, MRC5, MEF, Hep G2, HeLa B, HeLa T4, COS, COS-1, COS-6, COS-M6A, BS-C-1 monkey kidney epithelial, BALB/3T3 mouse embryo fibroblast, 3T3 Swiss, 3T3-L1, 132-d5 human fetal fibroblasts; 10.1 mouse fibroblasts, 293-T, 3T3, 721, 9L, A2780, A2780ADR, A2780cis, A172, A20, A253, A431, A-549, ALC, B16, B35, BCP-1 cells, BEAS-2B, bEnd.3, BHK-21, BR 293, BxPC3, C3H-10T1/2, C6/36, Cal-27, CHO, CHO-7, CHO-IR, CHO-K1, CHO-K2, CHO-T, CHO Dhfr−/−, COR-L23, COR-L23/CPR, COR-L23/5010, COR-L23/R23, COS-7, COV-434, CML T1, CMT, CT26, D17, DH82, DU145, DuCaP, EL4, EM2, EM3, EMT6/AR1, EMT6/AR10.0, FM3, H1299, H69, HB54, HB55, HCA2, HEK-293, HeLa, Hepa1c1c7, HL-60, HMEC, HT-29, Jurkat, JY cells, K562 cells, Ku812, KCL22, KG1, KYO1, LNCap, Ma-Mel 1-48, MC-38, MCF-7, MCF-10A, MDA-MB-231, MDA-MB-468, MDA-MB-435, MDCK II, MDCK II, MOR/0.2R, MONO-MAC 6, MTD-1A, MyEnd, NCI-H69/CPR, NCI-H69/LX10, NCI-H69/LX20, NCI-H69/LX4, NIH-3T3, NALM-1, NW-145, OPCN/OPCT cell lines, Peer, PNT-1A/PNT 2, RenCa, RIN-5F, RMA/RMAS, Saos-2 cells, Sf-9, SkBr3, T2, T-47D, T84, THP1 cell line, U373, U87, U937, VCaP, Vero cells, WM39, WT-49, X63, YAC-1, YAR, and transgenic varieties thereof. Cell lines are available from a variety of sources known to those with skill in the art (see, e.g., the American Type Culture Collection (ATCC) (Manassas, Va.)). In some embodiments, a cell transfected with one or more vectors described herein is used to establish a new cell line comprising one or more vector-derived sequences.

[0543] In some embodiments, one or more vectors described herein are used to produce a non-human transgenic animal or transgenic plant. In some embodiments, the transgenic animal is a mammal, such as a mouse, rat, or rabbit. In certain embodiments, the organism or subject is a plant. In certain embodiments, the organism or subject or plant is algae. Methods for producing transgenic plants and animals are known in the art, and generally begin with a method of cell transfection, such as described herein.

[0544] In one aspect, the invention provides for methods of modifying a target polynucleotide in a prokaryotic or eukaryotic cell, which may be in vivo, ex vivo or in vitro. In some embodiments, the method comprises sampling a cell or population of cells from a human or non-human animal or plant (including micro-algae) and modifying the cell or cells. Culturing may occur at any stage ex vivo. The cell or cells may even be re-introduced into the non-human animal or plant (including micro-algae).

[0545] In plants, pathogens are often host-specific. For example, Fusariumn oxysporum f sp. lycopersici causes tomato wilt but attacks only tomato, and F. oxysporum f. dianthii Puccinia graminis f. sp. tritici attacks only wheat. Plants have existing and induced defenses to resist most pathogens. Mutations and recombination events across plant generations lead to genetic variability that gives rise to susceptibility, especially as pathogens reproduce with more frequency than plants. In plants there can be non-host resistance, e.g., the host and pathogen are incompatible. There can also be Horizontal Resistance, e.g., partial resistance against all races of a pathogen, typically controlled by many genes and Vertical Resistance, e.g., complete resistance to some races of a pathogen but not to other races, typically controlled by a few genes. In a Gene-for-Gene level, plants and pathogens evolve together, and the genetic changes in one balance changes in other. Accordingly, using Natural Variability, breeders combine most useful genes for Yield. Quality, Uniformity, Hardiness, Resistance. The sources of resistance genes include native or foreign Varieties, Heirloom Varieties, Wild Plant Relatives, and Induced Mutations, e.g., treating plant material with mutagenic agents. Using the present invention, plant breeders are provided with a new tool to induce mutations. Accordingly, one skilled in the art can analyze the genome of sources of resistance genes, and in Varieties having desired characteristics or traits employ the present invention to induce the rise of resistance genes, with more precision than previous mutagenic agents and hence accelerate and improve plant breeding programs.

[0546] Examples of target polynucleotides include a sequence associated with a signaling biochemical pathway, e.g., a signaling biochemical pathway-associated gene or polynucleotide. Examples of target polynucleotides include a disease associated gene or polynucleotide. A “disease-associated” gene or polynucleotide refers to any gene or polynucleotide which is yielding transcription or translation products at an abnormal level or in an abnormal form in cells derived from a disease-affected tissues compared with tissues or cells of a non disease control. It may be a gene that becomes expressed at an abnormally high level; it may be a gene that becomes expressed at an abnormally low level, where the altered expression correlates with the occurrence and/or progression of the disease. A disease-associated gene also refers to a gene possessing mutation(s) or genetic variation that is directly responsible or is in linkage disequilibrium with a gene(s) that is responsible for the etiology of a disease. The transcribed or translated products may be known or unknown, and may be at a normal or abnormal level.

### 6.10.7. Lipid Nanoparticle Delivery

[0547] In some embodiments, the delivery system is packaged in one or more LNPs and administered intravenously. In some embodiments, the co-delivery system is packaged in one or more LNPs and administered intrathecally. In some embodiments, the co-delivery system is packaged in one or more LNPs and administered by intracerebral ventricular injection. In some embodiments, the co-delivery system is packaged in one or more LNPs and administered by intracisternal magna administration. In some embodiments, the co-delivery system is packaged in one or more LNPs and administered by intravitreal injection.

[0548] The preparation of lipid:nucleic acid complexes, including targeted liposomes such as immunolipid complexes, is well known to one of skill in the art (see, e.g., Crystal, Science 270:404-410 (1995); Blaese et al., Cancer Gene Ther. 2:291-297 (1995); Behr et al., Bioconjugate Chem. 5:382-389 (1994); Remy et al., Bioconjugate Chem. 5:647-654 (1994); Gao et al., Gene Therapy 2:710-722 (1995); Ahmad et al., Cancer Res. 52:4817-4820 (1992); U.S. Pat. Nos. 4,186,183, 4,217,344, 4,235,871, 4,261,975, 4,485,054, 4,501,728, 4,774,085, 4,837,028, and 4,946,787). In some embodiments, the LNP formulations are selected from LP01 (Cas No. 1799316-64-5), ALC-0315 (Cas No. 2036272-55-4), and cKK-E12 (Cas No. 1432494-65-9). In some embodiments, the LNP formulation is LP01. In some embodiments, the LNP formulation is ALC-0315. In some embodiment, the LNP formulation is cKK-E12.

[0549] In some embodiments, LNP doses range from about 0.1 mg/kg to about 100 mg/kg (or any of the values or subranges therein). In some embodiments, LNP doses is about 0.1 mg/kg, about 0.2 mg/kg, about 0.3 mg/kg, about 0.4 mg/kg, about 0.5 mg/kg, about 0.6 mg/kg, about 0.7 mg/kg, about 0.8 mg/kg, about 0.9 mg/kg, about 1.0 mg/kg, 1.5 mg/kg, about 2 mg/kg, about 2.5 mg/kg, about 3 mg/kg, about 3.5 mg/kg, about 4 mg/kg, about 4.5 mg/kg, about 5 mg/kg, about 6 mg/kg, about 7 mg/kg, about 7 mg/kg, about 8 mg/kg, about 9 mg/kg, about 10 mg/kg, about 15 mg/kg, about 20 mg/kg, about 25 mg/kg, about 30 mg/kg, about 35 mg/kg, about 40 mg/kg, about 45 mg/kg, or about 50 mg/kg or more.

[0550] In another embodiment, LNP doses of about 0.01 to about 1 mg per kg of body weight administered intravenously are contemplated. Medications to reduce the risk of infusion-related reactions are contemplated, such as dexamethasone, acetaminophen, diphenhydramine or cetirizine, and ranitidine are contemplated. Multiple doses of about 0.3 mg per kilogram every 4 weeks for five doses are also contemplated.

[0551] The charge of the LNP must be taken into consideration. As cationic lipids combined with negatively charged lipids to induce nonbilayer structures that facilitate intracellular delivery. Because charged LNPs are rapidly cleared from circulation following intravenous injection, ionizable cationic lipids with pKa values below 7 were developed (see, e.g., Rosin et al, Molecular Therapy, vol. 19, no. 12, pages 1286-2200, December 2011). Negatively charged polymers such as RNA may be loaded into LNPs at low pH values (e.g., pH 4) where the ionizable lipids display a positive charge. However, at physiological pH values, the LNPs exhibit a low surface charge compatible with longer circulation times. Four species of ionizable cationic lipids have been focused upon, namely 1,2-dilineoyl-3-dimethylammonium-propane (DLinDAP), 1,2-dilinoleyloxy-3-N,N-dimethylaminopropane (DLinDMA), 1,2-dilinoleyloxy-keto-N,N-dimethyl-3-aminopropane (DLinKDMA), and 1,2-dilinoleyl-4-(2-dimethylaminoethyl)-[1,3]-dioxolane (DLinKC2-DMA). It has been shown that LNP siRNA systems containing these lipids exhibit remarkably different gene silencing properties in hepatocytes in vivo, with potencies varying according to the series DLinKC2-DMA>DLinKDMA>DLinDMA>>DLinDAP employing a Factor VII gene silencing model (see, e.g., Rosin et al, Molecular Therapy, vol. 19, no. 12, pages 1286-2200, December 2011). A dosage of 1 μg/ml of LNP in or associated with the LNP may be contemplated, especially for a formulation containing DLinKC2-DMA.

[0552] In some embodiments, the LNP composition comprises one or more one or more ionizable lipids. As used herein, the term “ionizable lipid” has its ordinary meaning in the art and may refer to a lipid comprising one or more charged moieties. In some embodiments, an ionizable lipid may be positively charged or negatively charged. In principle, there are no specific limitations concerning the ionizable lipids of the LNP compositions disclosed herein. In some embodiments, the one or more ionizable lipids are selected from the group consisting of 3-(didodecylamino)-N1,N1,4-tridodecyl-1-piperazineethanamine (KL10), N1-[2-(didodecylamino)ethyl]-N1,N4,N4-tridodecyl-1,4-piperazinediethanami-ne (KL22), 14,25-ditridecyl-15,18,21,24-tetraaza-octatriacontane (KL25), 1,2-dilinoleyloxy-N,N-dimethylaminopropane (DLin-DMA), 2,2-dilinoleyl-4-dimethylaminomethyl-[1,3]-dioxolane (DLin-K-DMA), heptatriaconta-6,9,28,31-tetraen-19-yl 4-(dimethylamino)butanoate (DLin-MC3-DMA), 2,2-dilinoleyl-4-(2-dimethylaminoethyl)-[1,3]-dioxolane (DLin-KC2-DMA), 1,2-dioleyloxy-N,N-dimethylaminopropane (DODMA), 2-({8-[(3)-cholest-5-en-3-yloxy]octyl}oxy)-N,N-dimethyl-3-[(9Z,12Z)-octad-eca-9,12-dien-1-yloxy]propan-1-amine (Octyl-CLinDMA), (2R)-2-({8-[(3)-cholest-5-en-3-yloxy]octyl}oxy)-N,N-dimethyl-3-[(9Z,12Z)-octadeca-9,12-dien-1-yloxy]propan-1-amine (Octyl-CLinDMA (2R)), and (2S)-2-({8-[(3)-cholest-5-en-3-yloxy]octyl}oxy)-N,N-dimethyl-3-[(9Z,12Z)-octadeca-9,12-dien-1-y loxy]propan-1-amine (Octyl-CLinDMA (2S)). In one embodiment, the ionizable lipid may be selected from, but not limited to, an ionizable lipid described in International Publication Nos. WO2013086354 and WO2013116126.

[0553] In some embodiments, the lipid nanoparticle may include one or more (e.g., 1, 2, 3, 4, 5, 6, 7, or 8) cationic and/or ionizable lipids. Such cationic and/or ionizable lipids include, but are not limited to, 3-(didodecylamino)-N1,N1,4-tridodecyl-1-piperazineethanamine (KL10), N1-[2-(didodecylamino)ethyl]-N1,N4,N4-tridodecyl-1,4-piperazinediethanami-ne (KL22), 14,25-ditridecyl-15,18,21,24-tetraaza-octatriacontane (KL25), 1,2-dilinoleyloxy-N,N-dimethylaminopropane (DLin-DMA), 2,2-dilinoleyl-4-dimethylaminomethyl-[1,3]-dioxolane (DLin-K-DMA), heptatriaconta-6,9,28,31-tetraen-19-yl 4-(dimethylamino)butanoate (DLin-MC3-DMA), 2,2-dilinoleyl-4-(2-dimethylaminoethyl)-[1,3]-dioxolane (DLin-KC2-DMA), 2-({8-[(3.beta.)-cholest-5-en-3-yloxy]octyl}oxy)-N,N-dimethyl-3-[(9Z,12Z)- -octadeca-9,12-dien-1-yloxy]propan-1-amine (Octyl-CLinDMA), (2R)-2-({8-[(3.beta.)-cholest-5-en-3-yloxy]octyl}oxy)-N,N-dimethyl-3-[(9Z-,12Z)-octadeca-9,12-dien-1-yl oxy]propan-1-amine (Octyl-CLinDMA (2R)), (2S)-2-({8-[(3pcholest-5-en-3-yloxy]octyl}oxy)-N,N-dimethyl-3-[(9Z-,12Z)-octadeca-9,12-dien-1-yl oxy]propan-1-amine (Octyl-CLinDMA (2S)). N,N-dioleyl-N,N-dimethylammonium chloride (“DODAC”); N-(2,3-dioleyloxy)propyl-N,N—N-triethylammonium chloride (“DOTMA”); N,N-distearyl-N,N-dimethylammonium bromide (“DDAB”); N-(2,3-dioleoyloxy)propyl)-N,N,N-trimethylammonium chloride (“DOTAP”); 1,2-Dioleyloxy-3-trimethylaminopropane chloride salt (“DOTAP.Cl”); 3-.beta.-(N—(N′,N′-dimethylaminoethane)-carbamoyl)cholesterol (“DC-Chol”), N-(1-(2,3-dioleyloxy)propyl)-N-2-(sperminecarboxamido)ethyl)-N,N-dimethyl- -ammonium trifluoracetate (“DOSPA”), dioctadecylamidoglycyl carboxyspermine (“DOGS”), 1,2-dioleoyl-3-dimethylammonium propane (“DODAP”), N,N-dimethyl-2,3-dioleyloxy)propylamine (“DODMA”), and N-(1,2-dimyristyloxyprop-3-yl)-N,N-dimethyl-N-hydroxyethyl ammonium bromide (“DMRIE”). Additionally, a number of commercial preparations of cationic and/or ionizable lipids can be used, such as, e.g., LIPOFECTIN® (including DOTMA and DOPE, available from GIBCO/BRL), and LIPOFECTAMINE® (including DOSPA and DOPE, available from GIBCO/BRL). KL10, KL22, and KL25 are described, for example, in U.S. Pat. No. 8,691,750.

[0554] In some embodiments, the LNP composition comprises one or more amino lipids. The terms “amino lipid” and “cationic lipid” are used interchangeably herein to include those lipids and salts thereof having one, two, three, or more fatty acid or fatty alkyl chains and a pH-titratable amino head group (e.g., an alkylamino or dialkylamino head group). In principle, there are no specific limitations concerning the amino lipids of the LNP compositions disclosed herein. The cationic lipid is typically protonated (i.e., positively charged) at a pH below the pKa of the cationic lipid and is substantially neutral at a pH above the pKa. The cationic lipids can also be termed titratable cationic lipids. In some embodiments, the one or more cationic lipids include: a protonatable tertiary amine (e.g., pH-titratable) head group; alkyl chains, wherein each alkyl chain independently has 0 to 3 (e.g., 0, 1, 2, or 3) double bonds; and ether, ester, or ketal linkages between the head group and alkyl chains. Such cationic lipids include, but are not limited to, DSDMA, DODMA, DOTMA, DLinDMA, DLenDMA, .gamma.-DLenDMA, DLin-K-DMA, DLin-K-C2-DMA (also known as DLin-C2K-DMA, XTC2, and C2K), DLin-K-C3-DMA, DLin-K-C4-DMA, DLen-C2K-DMA, y-DLen-C2-DMA, C12-200, cKK-E12, cKK-A12, cKK-O12, DLin-MC2-DMA (also known as MC2), and DLin-MC3-DMA (also known as MC3).

[0555] Anionic lipids suitable for use in lipid nanoparticles include, but are not limited to, phosphatidylglycerol, cardiolipin, diacylphosphatidylserine, diacylphosphatidic acid, N-dodecanoyl phosphatidylethanoloamine, N-succinyl phosphatidylethanolamine, N-glutaryl phosphatidylethanolamine, lysylphosphatidylglycerol, and other anionic modifying groups joined to neutral lipids.

[0556] Neutral lipids (including both uncharged and zwitterionic lipids) suitable for use in lipid nanoparticles include, but are not limited to, diacylphosphatidylcholine, diacylphosphatidylethanolamine, ceramide, sphingomyelin, dihydrosphingomyelin, cephalin, sterols (e.g., cholesterol) and cerebrosides. In some embodiments, the lipid nanoparticle comprises cholesterol. Lipids having a variety of acyl chain groups of varying chain length and degree of saturation are available or may be isolated or synthesized by well-known techniques. Additionally, lipids having mixtures of saturated and unsaturated fatty acid chains and cyclic regions can be used. In some embodiments, the neutral lipids used in the disclosure are DOPE, DSPC, DPPC, POPC, or any related phosphatidylcholine. In some embodiments, the neutral lipid may be composed of sphingomyelin, dihydrosphingomyeline, or phospholipids with other head groups, such as serine and inositol.

[0557] In some embodiments, amphipathic lipids are included in nanoparticles. Exemplary amphipathic lipids suitable for use in nanoparticles include, but are not limited to, sphingolipids, phospholipids, fatty acids, and amino lipids.

[0558] The lipid composition of the pharmaceutical composition may comprise one or more phospholipids, for example, one or more saturated or (poly)unsaturated phospholipids or a combination thereof. In general, phospholipids comprise a phospholipid moiety and one or more fatty acid moieties.

[0559] A phospholipid moiety can be selected, for example, from the non-limiting group consisting of phosphatidyl choline, phosphatidyl ethanolamine, phosphatidyl glycerol, phosphatidyl serine, phosphatidic acid, 2-lysophosphatidyl choline, and a sphingomyelin.

[0560] A fatty acid moiety can be selected, for example, from the non-limiting group consisting of lauric acid, myristic acid, myristoleic acid, palmitic acid, palmitoleic acid, stearic acid, oleic acid, linoleic acid, alpha-linolenic acid, erucic acid, phytanoic acid, arachidic acid, arachidonic acid, eicosapentaenoic acid, behenic acid, docosapentaenoic acid, and docosahexaenoic acid.

[0561] Particular amphipathic lipids can facilitate fusion to a membrane. For example, a cationic phospholipid can interact with one or more negatively charged phospholipids of a membrane (e.g., a cellular or intracellular membrane). Fusion of a phospholipid to a membrane can allow one or more elements (e.g., a therapeutic agent) of a lipid-containing composition (e.g., LNPs) to pass through the membrane permitting, e.g., delivery of the one or more elements to a target tissue.

[0562] Non-natural amphipathic lipid species including natural species with modifications and substitutions including branching, oxidation, cyclization, and alkynes are also contemplated. For example, a phospholipid can be functionalized with or cross-linked to one or more alkynes (e.g., an alkenyl group in which one or more double bonds is replaced with a triple bond). Under appropriate reaction conditions, an alkyne group can undergo a copper-catalyzed cycloaddition upon exposure to an azide. Such reactions can be useful in functionalizing a lipid bilayer of a nanoparticle composition to facilitate membrane permeation or cellular recognition or in conjugating a nanoparticle composition to a useful component such as a targeting or imaging moiety (e.g., a dye).

[0563] Phospholipids include, but are not limited to, glycerophospholipids such as phosphatidylcholines, phosphatidylethanolamines, phosphatidylserines, phosphatidylinositols, phosphatidy glycerols, and phosphatidic acids. Phospholipids also include phosphosphingolipid, such as sphingomyelin.

[0564] In some embodiments, the LNP composition comprises one or more phospholipids. In some embodiments, the phospholipid is selected from the group consisting of 1,2-dilinoleoyl-sn-glycero-3-phosphocholine (DLPC), 1,2-dimyristoyl-sn-glycero-phosphocholine (DMPC), 1,2-dioleoyl-sn-glycero-3-phosphocholine (DOPC), 1,2-dipalmitoyl-sn-glycero-3-phosphocholine (DPPC), 1,2-distearoyl-sn-glycero-3-phosphocholine (DSPC), 1,2-diundecanoyl-sn-glycero-phosphocholine (DUPC), 1-palmitoyl-2-oleoyl-sn-glycero-3-phosphocholine (POPC), 1,2-di-O-octadecenyl-sn-glycero-3-phosphocholine (18:0 Diether PC), 1-oleoyl-2-cholesterylhemisuccinoyl-sn-glycero-3-phosphocholine (OChemsPC), 1-hexadecyl-sn-glycero-3-phosphocholine (C16 Lyso PC), 1,2-dilinolenoyl-sn-glycero-3-phosphocholine, 1,2-diarachidonoyl-sn-glycero-3-phosphocholine, 1,2-didocosahexaenoyl-sn-glycero-3-phosphocholine, 1,2-dioleoyl-sn-glycero-3-phosphoethanolamine (DOPE), 1,2-diphytanoyl-sn-glycero-3-phosphoethanolamine (ME 16:0 PE), 1,2-distearoyl-sn-glycero-3-phosphoethanolamine, 1,2-dilinoleoyl-sn-glycero-3-phosphoethanolamine, 1,2-dilinolenoyl-sn-glycero-3-phosphoethanolamine, 1,2-diarachidonoyl-sn-glycero-3-phosphoethanolaminel,2-didocosahexaenoyl-sn-glycero-3-phosphoethanolamine, 1,2-dioleoyl-sn-glycero-3-phospho-rac-(1-glycerol) sodium salt (DOPG), sphingomyelin, and any mixtures thereof.

[0565] Other phosphorus-lacking compounds, such as sphingolipids, glycosphingolipid families, diacylglycerols, and .beta.-acyloxyacids, may also be used. Additionally, such amphipathic lipids can be readily mixed with other lipids, such as triglycerides and sterols.

[0566] In some embodiments, the LNP composition comprises one or more helper lipids. The term “helper lipid” as used herein refers to lipids that enhance transfection (e.g., transfection of an LNP comprising an mRNA that encodes a site-directed endonuclease, such as a SpCas9 polypeptide). In principle, there are no specific limitations concerning the helper lipids of the LNP compositions disclosed herein. Without being bound to any particular theory, it is believed that the mechanism by which the helper lipid enhances transfection includes enhancing particle stability. In some embodiments, the helper lipid enhances membrane fusogenicity. Generally, the helper lipid of the LNP compositions disclosure herein can be any helper lipid known in the art. Non-limiting examples of helper lipids suitable for the compositions and methods include steroids, sterols, and alkyl resorcinols. Particularly helper lipids suitable for use in the present disclosure include, but are not limited to, saturated phosphatidylcholine (PC) such as distearoyl-PC (DSPC) and dipalymitoyl-PC (DPPC), dioleoylphosphatidylethanolamine (DOPE), 1,2-dilinoleoyl-sn-glycero-3-phosphocholine (DLPC), cholesterol, 5-heptadecylresorcinol, and cholesterol hemisuccinate. In some embodiments, the helper lipid of the LNP composition includes cholesterol.

[0567] In some embodiments, the LNP composition comprises one or more structural lipids. As used herein, the term “structural lipid” refers to sterols and also to lipids containing sterol moieties. Without being bound to any particular theory, it is believed that the incorporation of structural lipids into the LNPs mitigates aggregation of other lipids in the particle. Structural lipids can be selected from the group including but not limited to, cholesterol, fecosterol, sitosterol, ergosterol, campesterol, stigmasterol, brassicasterol, tomatidine, tomatine, ursolic acid, alpha-tocopherol, hopanoids, phytosterols, steroids, and mixtures thereof. In some embodiments, the structural lipid is a sterol. As defined herein, “sterols” are a subgroup of steroids consisting of steroid alcohols. In certain embodiments, the structural lipid is a steroid. In some embodiments, the structural lipid is cholesterol. In certain embodiments, the structural lipid is an analog of cholesterol.

[0568] The lipid component of a lipid nanoparticle composition may include one or more molecules comprising polyethylene glycol, such as PEG or PEG-modified lipids. In some embodiments, the LNP composition disclosed herein comprise one or more polyethylene glycol (PEG) lipid. The term “PEG-lipid” refers to polyethylene glycol (PEG)-modified lipids. Such lipids are also referred to as PEGylated lipids. Non-limiting examples of PEG-lipids include PEG-modified phosphatidylethanolamine and phosphatidic acid, PEG-ceramide conjugates (e.g., PEG-CerC14 or PEG-CerC20), PEG-modified dialkylamines and PEG-modified 1,2-diacyloxypropan-3-amines For example, a PEG lipid can be PEG-c-DOMG, PEG-DMG, PEG-DLPE, PEG-DMPE, PEG-DPPC, or a PEG-DSPE lipid. In some embodiments, the PEG-lipid includes, but not limited to 1,2-dimyristoyl-sn-glycerol methoxypolyethylene glycol (PEG-DMG), 1,2-distearoyl-sn-glycero-3-phosphoethanolamine-N-[amino(polyethylene glycol)](PEG-DSPE), PEG-disteryl glycerol (PEG-DSG), PEG-dipalmetoleyl, PEG-dioleyl, PEG-distearyl, PEG-diacylglycamide (PEG-DAG), PEG-dipalmitoyl phosphatidylethanolamine (PEG-DPPE), or PEG-1,2-dimyristyloxlpropyl-3-amine (PEG-c-DMA). In some embodiments, the PEG-lipid is selected from the group consisting of a PEG-modified phosphatidylethanolamine, a PEG-modified phosphatidic acid, a PEG-modified ceramide, a PEG-modified dialkylamine, a PEG-modified diacylglycerol, a PEG-modified dialkylglycerol, and mixtures thereof. In some embodiments, the lipid moiety of the PEG-lipids includes those having lengths of from about C.sub.14 to about C.sub.22, preferably from about C.sub.14 to about C.sub.16. In some embodiments, a PEG moiety, for example a mPEG-NH.sub.2, has a size of about 1000, 2000, 5000, 10,000, 15,000 or 20,000 daltons. In some embodiment, the PEG-lipid is PEG2k-DMG. In some embodiments, the one or more PEG lipids of the LNP composition comprises PEG-DMPE. In some embodiments, the one or more PEG lipids of the LNP composition comprises PEG-DMG.

[0569] In some embodiments, the ratio between the lipid components and the nucleic acid molecules of the LNP composition, e.g., the weight ratio, is sufficient for (i) formation of LNPs with desired characteristics, e.g., size, charge, and (ii) delivery of a sufficient dose of nucleic acid at a dose of the lipid component(s) that is tolerable for in vivo administration as readily ascertained by one of skill in the art.

[0570] In certain embodiments, it is desirable to target a nanoparticle, e.g., a lipid nanoparticle, using a targeting moiety that is specific to a cell type and/or tissue type. In some embodiments, a nanoparticle may be targeted to a particular cell, tissue, and/or organ using a targeting moiety. In particular embodiments, a nanoparticle comprises a targeting moiety. Exemplary non-limiting targeting moieties include ligands, cell surface receptors, glycoproteins, vitamins (e.g., riboflavin) and antibodies (e.g., full-length antibodies, antibody fragments (e.g., Fv fragments, single chain Fv (scFv) fragments, Fab′ fragments, or F(ab′)2 fragments), single domain antibodies, camelid antibodies and fragments thereof, human antibodies and fragments thereof, monoclonal antibodies, and multispecific antibodies (e.g., bispecific antibodies)). In some embodiments, the targeting moiety may be a polypeptide. The targeting moiety may include the entire polypeptide (e.g., peptide or protein) or fragments thereof. A targeting moiety is typically positioned on the outer surface of the nanoparticle in such a manner that the targeting moiety is available for interaction with the target, for example, a cell surface receptor. A variety of different targeting moieties and methods are known and available in the art, including those described, e.g., in Sapra et al., Prog. Lipid Res. 42(5):439-62, 2003 and Abra et al., J. Liposome Res. 12:1-3, 2002.

[0571] In some embodiments, a lipid nanoparticle (e.g., a liposome) may include a surface coating of hydrophilic polymer chains, such as polyethylene glycol (PEG) chains (see, e.g., Allen et al., Biochimica et Biophysica Acta 1237: 99-108, 1995; DeFrees et al., Journal of the American Chemistry Society 118: 6101-6104, 1996; Blume et al., Biochimica et Biophysica Acta 1149: 180-184,1993; Klibanov et al., Journal of Liposome Research 2: 321-334, 1992; U.S. Pat. No. 5,013,556; Zalipsky, Bioconjugate Chemistry 4: 296-299, 1993; Zalipsky, FEBS Letters 353: 71-74, 1994; Zalipsky, in Stealth Liposomes Chapter 9 (Lasic and Martin, Eds) CRC Press, Boca Raton Fla., 1995). In one approach, a targeting moiety for targeting the lipid nanoparticle is linked to the polar head group of lipids forming the nanoparticle. In another approach, the targeting moiety is attached to the distal ends of the PEG chains forming the hydrophilic polymer coating (see, e.g., Klibanov et al., Journal of Liposome Research 2: 321-334, 1992; Kirpotin et al., FEBS Letters 388: 115-118, 1996).

[0572] Standard methods for coupling the targeting moiety or moieties may be used. For example, phosphatidylethanolamine, which can be activated for attachment of targeting moieties, or derivatized lipophilic compounds, such as lipid-derivatized bleomycin, can be used. Antibody-targeted liposomes can be constructed using, for instance, liposomes that incorporate protein A (see, e.g., Renneisen et al., J. Bio. Chem., 265:16337-16342, 1990 and Leonetti et al., Proc. Natl. Acad. Sci. (USA), 87:2448-2451, 1990). Other examples of antibody conjugation are disclosed in U.S. Pat. No. 6,027,726. Examples of targeting moieties can also include other polypeptides that are specific to cellular components, including antigens associated with neoplasms or tumors. Polypeptides used as targeting moieties can be attached to the liposomes via covalent bonds (see, for example Heath, Covalent Attachment of Proteins to Liposomes, 149 Methods in Enzymology 111-119 (Academic Press, Inc. 1987)). Other targeting methods include the biotin-avidin system.

[0573] In some embodiments, a lipid nanoparticle includes a targeting moiety that targets the lipid nanoparticle to a cell including, but not limited to, hepatocytes, colon cells, epithelial cells, hematopoietic cells, epithelial cells, endothelial cells, lung cells, bone cells, stem cells, mesenchymal cells, neural cells, cardiac cells, adipocytes, vascular smooth muscle cells, cardiomyocytes, skeletal muscle cells, beta cells, pituitary cells, synovial lining cells, ovarian cells, testicular cells, fibroblasts, B cells, T cells, reticulocytes, leukocytes, granulocytes, and tumor cells (including primary tumor cells and metastatic tumor cells). In particular embodiments, the targeting moiety targets the lipid nanoparticle to a hepatocyte.

[0574] The lipid nanoparticles described herein may be lipidoid-based. The synthesis of lipidoids has been extensively described and formulations containing these compounds are particularly suited for delivery of polynucleotides (see Mahon et al., Bioconjug Chem. 2010 21:1448-1454; Schroeder et al., J Intern Med. 2010 267:9-21; Akinc et al., Nat. Biotechnol. 2008 26:561-569; Love et al., Proc Natl Acad Sci USA. 2010 107:1864-1869; Siegwart et al., Proc Natl Acad Sci USA. 2011 108:12996-3001).

[0575] The characteristics of optimized lipidoid formulations for intramuscular or subcutaneous routes may vary significantly depending on the target cell type and the ability of formulations to diffuse through the extracellular matrix into the blood stream. While a particle size of less than 150 nm may be desired for effective hepatocyte delivery due to the size of the endothelial fenestrae (see e.g., Akinc et al., Mol Ther. 2009 17:872-879), use of lipidoid oligonucleotides to deliver the formulation to other cells types including, but not limited to, endothelial cells, myeloid cells, and muscle cells may not be similarly size-limited.

[0576] In one aspect, effective delivery to myeloid cells, such as monocytes, lipidoid formulations may have a similar component molar ratio. Different ratios of lipidoids and other components including, but not limited to, a neutral lipid (e.g., diacylphosphatidylcholine), cholesterol, a PEGylated lipid (e.g., PEG-DMPE), and a fatty acid (e.g., an omega-3 fatty acid) may be used to optimize the formulation of the mRNA or system for delivery to different cell types including, but not limited to, hepatocytes, myeloid cells, muscle cells, etc. Exemplary lipidoids include, but are not limited to, DLin-DMA, DLin-K-DMA, DLin-KC2-DMA, 98N12-5, C12-200 (including variants and derivatives), DLin-MC3-DMA and analogs thereof. The use of lipidoid formulations for the localized delivery of nucleic acids to cells (such as, but not limited to, adipose cells and muscle cells) via either subcutaneous or intramuscular delivery, may also not require all of the formulation components which may be required for systemic delivery, and as such may comprise the lipidoid and the mRNA or system.

[0577] According to the present disclosure, a system described herein may be formulated by mixing the mRNA or system, or individual components of the system, with the lipidoid at a set ratio prior to addition to cells. In vivo formulations may require the addition of extra ingredients to facilitate circulation throughout the body. After formation of the particle, a system or individual components of a system is added and allowed to integrate with the complex. The encapsulation efficiency is determined using a standard dye exclusion assays.

[0578] In vivo delivery of systems may be affected by many parameters, including, but not limited to, the formulation composition, nature of particle PEGylation, degree of loading, oligonucleotide to lipid ratio, and biophysical parameters such as particle size (Akinc et al., Mol Ther. 2009 17:872-879; herein incorporated by reference in its entirety). As an example, small changes in the anchor chain length of poly(ethylene glycol) (PEG) lipids may result in significant effects on in vivo efficacy. Formulations with the different lipidoids, including, but not limited to penta[3-(1-laurylaminopropionyl)]-triethylenetetramine hydrochloride (TETA-5LAP; aka 98N12-5, see Murugaiah et al., Analytical Biochemistry, 401:61 (2010)), C12-200 (including derivatives and variants), MD1, DLin-DMA, DLin-K-DMA, DLin-KC2-DMA and DLin-MC3-DMA can be tested for in vivo activity. The lipidoid referred to herein as “98N12-5” is disclosed by Akinc et al., Mol Ther. 2009 17:872-879). The lipidoid referred to herein as “C12-200” is disclosed by Love et al., Proc Natl Acad Sci USA. 2010 107:1864-1869 and Liu and Huang, Molecular Therapy. 2010 669-670.

[0579] The LNPs of the present disclosure, in which a nucleic acid is entrapped within the lipid portion of the particle and is protected from degradation, can be formed by any method known in the art including, but not limited to, a continuous mixing method, a direct dilution process, and an in-line dilution process. Additional techniques and methods suitable for the preparation of the LNPs described herein include coacervation, microemulsions, supercritical fluid technologies, phase-inversion temperature (PIT) techniques.

[0580] In some embodiments, the LNPs used herein are produced via a continuous mixing method, e.g., a process that includes providing an aqueous solution a nucleic acid described herein in a first reservoir, providing an organic lipid solution in a second reservoir (wherein the lipids present in the organic lipid solution are solubilized in an organic solvent, e.g., a lower alkanol such as ethanol), and mixing the aqueous solution with the organic lipid solution such that the organic lipid solution mixes with the aqueous solution so as to substantially instantaneously produce a lipid vesicle (e.g., liposome) encapsulating the nucleic acid molecule within the lipid vesicle. This process and the apparatus for carrying out this process are known in the art. More information in this regard can be found in, for example, U.S. Patent Publication No. 20040142025. The action of continuously introducing lipid and buffer solutions into a mixing environment, such as in a mixing chamber, causes a continuous dilution of the lipid solution with the buffer solution, thereby producing a lipid vesicle substantially instantaneously upon mixing. By mixing the aqueous solution comprising a nucleic acid molecule with the organic lipid solution, the organic lipid solution undergoes a continuous stepwise dilution in the presence of the buffer solution (e.g., aqueous solution) to produce a nucleic acid-lipid particle.

[0581] In some embodiments, the LNPs used herein are produced via a direct dilution process that includes forming a lipid vesicle (e.g., liposome) solution and immediately and directly introducing the lipid vesicle solution into a collection vessel containing a controlled amount of dilution buffer. In some embodiments, the collection vessel includes one or more elements configured to stir the contents of the collection vessel to facilitate dilution. In some embodiments, the amount of dilution buffer present in the collection vessel is substantially equal to the volume of lipid vesicle solution introduced thereto.

[0582] In some embodiments, the LNPs are produced via an in-line dilution process in which a third reservoir containing dilution buffer is fluidly coupled to a second mixing region. In these embodiments, the lipid vesicle (e.g., liposome) solution formed in a first mixing region is immediately and directly mixed with dilution buffer in the second mixing region. These processes and the apparatuses for carrying out direct dilution and in-line dilution processes are known in the art. More information in this regard can be found in, for example, U.S. Patent Publication No. 20070042031.

### 6.11. Additional Delivery Modalities

[0583] This disclosure is not limited to systems and methods described herein. Any delivery method that is capable of delivering the systems described herein can be used as long as it is capable of site-specifically integrating a template polynucleotide into the genome of a cell.

### 6.12. Genes and Targets

[0584] This disclosure provides compositions, systems and methods for correcting or replacing genes or gene fragments (including introns or exons) or inserting genes in new locations. In certain embodiments, such a method comprises recombination or integration into a safe harbor site (SHS). A frequently used human SHS is the AAVS1 site on chromosome 19q, initially identified as a site for recurrent adeno-associated virus insertion. Another locus comprises the human homolog of the murine Rosa26 locus. Yet another SHS comprises the human H11 locus on chromosome 22. In some cases, a complete gene may be prohibitively large and replacement of an entire gene impractical. In certain embodiments, a method of the disclosure comprises recombining corrective gene fragments into a defective locus.

[0585] The methods and compositions can be used to target, without limitation, stem cells for example induced pluripotent stem cells (iPSCs), HSCs, HSPCs, mesenchymal stem cells, or neuronal stem cells and cells at various stages of differentiation. In certain embodiments, methods and compositions of the disclosure are adapted to target organoids, including patient derived organoids.

[0586] In certain embodiments, methods and compositions of the disclosure are adapted to treat muscle cells, not limited to cardiomyocytes for Duchene Muscular Dystrophy (DMD). The dystrophin gene is the largest gene in the human genome, spanning ˜2.3 Mb of DNA. DMD is composed of 79 exons resulting in a 14-kb full-length mRNA. Common mutations include mutations that disrupt the reading frame of generate a premature stop codon. An aspect of DMD that lends it to gene editing as a therapeutic approach is the modular structure of the dystrophin protein. Redundancy in the central rod domain permits the deletion of internal segments of the gene that may harbor loss-of-function mutations, thereby restoring the open reading frame (ORFs). In some embodiments, the methods and systems described herein are used to treat DMD by site-specifically integrating in the genome a polynucleotide template that repairs or replaces all or a portion of the defective DMD gene.

[0587] The following are non-limiting diseases that may be treated utilizing the methods and compositions of the present disclosure:

### Inherited Retinal Diseases:

[0588] 1. Stargardt Disease (ABCA4)
[0589] 2. Leber congenital amaurosis 10 (CEP290)
[0590] 3. X linked Retinitis Pigmentosa (RPGR)
[0591] 4. Autosomal Dominant Retinitis Pigmentosa (RHO)

### Liver Diseases:

[0592] 5. Wilson's disease (ATP7B)
[0593] 6. Alpha-1 antitrypsin (SERPINA1)

### Intellectual Disabilities:

[0594] 7. Rett Syndrome (MECP2)
[0595] 8. SYNGAP1-ID (SYNGAP1)
[0596] 9. CDKL5 deficiency disorder (CDKL5)

### Peripheral Neuropathies:

[0597] 10. Charcot-Marie-Tooth 2A (MFN2)

### Lung Diseases:

[0598] 11. Cystic Fibrosis (CFTR)
[0599] 12. Alpha-1 Antitrypsin (SERPINA1)
   Autoimmune diseases:
[0600] 13. IgA Nephropathy (Berger's disease)
[0601] 14. Anti-Neutrophil Cytoplasmic Antibody (ANCA) Vasculitis
[0602] 15. Systemic Lupus Erythematosus (SLE)/Lupus Nephritis (LN)
[0603] 16. Membranous Nephropathy (MN)
[0604] 17. C3 glomerulonephritis (C3GN)
[0605] 18. Minimal Change Disease

### Blood Disorders:

[0606] 19. Sickle Cell
[0607] 20. Hemophilia
[0608] 21. Factor VIII or
[0609] 22. Factor IX
[0610] 23. Ornithine transcarbamylase deficiency (OTCD)
[0611] 24. Homocystinuria (HCU)
[0612] 25. Phenylketonuria (PKU)

### Cancer

[0613] 26. Prostate cancer
[0614] 27. Renal cell cancer
[0615] 28. Thyroid cancer

### Cardiovascular Disorders:

[0616] 29. Atherosclerotic cardiovascular disease (ASCVD)

### Other Disorders:

[0617] 30. Hemochromatosis

### Other Immunological Disorders:

[0618] ANCA Vasculitis, Myasthenia Gravis (MG), Systemic sclerosis (SS), Idiopathic thrombocytopenic purpura (ITP), Multiple Sclerosis (MS), Guillain-Barre syndrome (GBS), Chronic Inflammatory Demyelinating polyradiculoneuropathy (CIDP), Pemphigus Vulgaris (PV), Bullous Pemphigoid (BP), Autoimmune Hepatitis (AIH), Autoimmune Hemolytic Anemia (AIHA), Dermatomyositis (DM), Polymyositis (PM), Scleroderma, Neuromyelitis optica spectrum disorders (NMOSD), Myelin oligodendrocyte glycoprotein antibody associated disease (MOGAD), Churg-Strauss syndrome/eosinophilic granulomatosis with polyangiitis (EGPA), CREST syndrome/limited cutaneous systemic sclerosis, Devic's disease/neuromyelitis optica (NMO), Granulomatosis with polyangiitis (GPA)/Wegener's granulomatosis, Henoch-Schonlein purpura/IgA vasculitis, autoimmune thrombocytopenic purpura/autoimmune thrombocytopenia, or Transverse Myelitis™.

[0619] CFTR (cystic fibrosis transmembrane conductance regulator). The most common cystic fibrosis (CF) mutation F508del removes a single amino acid. In some embodiments, recombining human CFTR into an SHS of a cell that expresses CFTR F508del is a corrective treatment path. In some embodiments, the methods and systems described herein are used to CF by site-specifically integrating in the genome a polynucleotide template that corrects the mutation causing CF. Proposed validation is detection of persistent CFTR mRNA and protein expression in transduced cells.

[0620] Sickle cell disease (SCD) is caused by mutation of a specific amino acid—valine to glutamic acid at amino acid position 6. In some embodiments, SCD is corrected by recombination of the HBB gene into a safe harbor site (SHS) and by demonstrating correction in a proportion of target cells that is high enough to produce a substantial benefit. In some embodiments, the methods and systems described herein are used to sickle cell disease by site-specifically integrating in the genome a polynucleotide template that corrects the mutation causing the disease. In some embodiments, validation is detection of persistent HBB mRNA and protein expression in transduced cells.

[0621] DMD—Duchenne Muscular Dystrophy. The dystrophin gene is the largest gene in the human genome, spanning ˜2.3 Mb of DNA. DMD is composed of 79 exons resulting in a 14-kb full-length mRNA. Common mutations include mutations that disrupt the reading frame of generate a premature stop codon. An aspect of DMD that lends it to gene editing as a therapeutic approach is the modular structure of the dystrophin protein. Redundancy in the central rod domain permits the deletion of internal segments of the gene that may harbor loss-of-function mutations, thereby restoring the open reading frame (ORFs).

[0622] In some embodiments, recombination will be into safe harbor sites (SHS). A frequently used human SHS is the AAVS1 site on chromosome 19q, initially identified as a site for recurrent adeno-associated virus insertion. In some embodiments, the site is the human homolog of the e murine Rosa26 locus (pubmed.ncbi.nlm.nih.gov/18037879). In some embodiments, the site is the human H11 locus on chromosome 22. Proposed target cells for recombination include stem cells for example induced pluripotent stem cells (iPSCs) and cells at various stages of differentiation. In some cases, a complete gene may be prohibitively large and replacement of an entire gene impractical. In such instances, rescuing mutants by recombining in corrected gene fragments with the methods and systems described herein is a corrective option.

[0623] In some embodiments, correcting mutations in exon 44 (or 51) by recombining in a corrective coding sequence downstream of exon 43 (or 50), using the methods and systems described herein is a corrective option. Proposed validation is detection of persistent DMD mRNA and protein expression in transduced cells.

[0624] F8 (Factor VIII). A large proportion of severe hemophilia A patients harbor one of two types of chromosomal inversions in the FVIII gene. The recombinase technology and methods described herein are well suited to correcting such inversions (and other mutations) by recombining of the FVIII gene into a SHS.

[0625] In some embodiments, correcting factor VIII deficiency by recombining the FVIII gene into an SHS is a corrective path. In some embodiments, the methods and systems described herein are used to correct factor VIII deficiency by site-specifically integrating in the genome a polynucleotide template that corrects the mutation causing the FIX deficiency. Proposed validation is detection of persistent FVIII mRNA and protein expression in transduced cells.

[0626] Factor 9 (Factor IX) Hemophilia B, also called factor IX (FIX) deficiency is a genetic disorder caused by missing or defective factor IX, a clotting protein.

[0627] In some embodiments, the methods and systems described herein are used to correct factor IX deficiency by site-specifically integrating in the genome a polynucleotide template that corrects the mutation causing the FIX deficiency. Proposed validation is detection of persistent FiX mRNA and protein expression in transduced cells.

[0628] Ornithine transcarbamylase deficiency (OTCD). Omithine transcarbamylase deficiency is a rare genetic condition that causes ammonia to build up in the blood. The condition—more commonly called OTC deficiency—is more common in boys than girls and tends to be more severe when symptoms emerge shortly after birth.

[0629] In some embodiments, the methods and systems described herein are used to correct OTC deficiency by site-specifically integrating in the genome a polynucleotide template that corrects the mutation causing the OTC deficiency or integrates a polynucleotide encoding a functional ornithine transcarbamylase enzyme. Proposed validation is detection of persistent OTC mRNA and protein expression in transduced cells.

[0630] Phenylketonuria, also called PKU, is a rare inherited disorder that causes an amino acid called phenylalanine to build up in the body. PKU is caused by a change in the phenylalanine hydroxylase (PAH) gene. This gene helps create the enzyme needed to break down phenylalanine.

[0631] In some embodiments, the methods and systems described herein are used to correct PKU by site-specifically integrating in the genome a polynucleotide template that corrects the mutation causing the PKU deficiency or integrates a polynucleotide encoding a functional phenylalanine hydroxylase (PAH) gene. Proposed validation is detection of persistent PAH mRNA and protein expression in transduced cells.

[0632] Homocystinuria (HCU). Homocystinuria is elevation of the amino acid, homocysteine (protein building block coming from our diet) in the urine or blood. Common causes of HCU include: problems with the enzyme cystathionine beta synthase (CBS), which converts homocysteine to the amino acid cystathionine (which then becomes cysteine) and needs the vitamin B6 (pyridoxine); and problems with converting homocysteine to the amino acid methionine.

[0633] In some embodiments, the methods and systems described herein are used to correct HCU by site-specifically integrating in the genome a polynucleotide template that corrects the mutation causing the HCU or integrates a polynucleotide encoding a functional copy of a gene (e.g., CBS) able to reduce or prevent buildup of homocysteine in the urine. Proposed validation is detection of persistent CBS mRNA and protein expression in transduced cells.

[0634] Hemochromatosis. Hemochromatosis a disorder in which the body can build up too much iron in the skin, heart, liver, pancreas, pituitary gland, and joints. Too much iron can lead to life-threatening conditions, such as liver disease, heart problems and diabetes. Hereditary hemochromatosis is most commonly caused by certain variants in the HFE gene. The two common disease-related mutations are C282Y and H63D.

[0635] In some embodiments, the methods and systems described herein are used to correct hemochromatosis by site-specific integrating in the genome a polynucleotide template that corrects the mutation causing hemochromatosis or integrates a polynucleotide encoding a functional HFE protein. Proposed validation is detection of persistent HFE mRNA and protein expression in transduced cells.

[0636] Atherosclerotic cardiovascular disease (ASCVD). Atherosclerotic cardiovascular disease (ASCVD) is caused by plaque buildup in arterial walls and refers to conditions that include, for example, coronary heart disease (CHD) (such as myocardial infarction, angina, and coronary artery stenosis), cerebrovascular disease (such as a transient ischemic attack, ischemic stroke, and carotid artery stenosis), peripheral artery disease (such as claudication), and aortic atherosclerotic disease (such as abdominal aortic aneurysm and descending thoracic aneurysm). In some examples, ASCVD is caused by a change in ApoA-1 gene.

[0637] In some embodiments, the methods and systems described herein are used to correct ASCVD by site-specifically integrating in the genome a polynucleotide template that corrects the mutation causing the ASCVD or integrates a polynucleotide encoding a functional ApoA-1. Proposed validation is detection of persistent ApoA-1 mRNA and protein expression in transduced cells.

[0638] IgA Nephropathy (Berger's disease). IgA nephropathy, also known as Berger's disease, is a kidney/autoimmune disease that occurs when an antibody called immunoglobulin A (IgA) builds up in the kidneys.

[0639] In some embodiments, the methods and systems described herein are used to treat Berger's disease by administering to a patient an iPSC-derived Natural Killer cell that includes a polynucleotide site-specifically integrated in the genome of the cell using the methods described herein. Upon administering the iPSC-NK cell to the patient, the iPSC-NK cell is capable of removing native cells (e.g., B cells) that are responsible, at least in part, for the symptoms of Berger's disease.

[0640] Anti-Neutrophil Cytoplasmic Antibody (ANCA) Vasculitis. ANCA vasculitis is an autoimmune disease affecting small blood vessels in the body. It is caused by autoantibodies called ANCAs, or Anti-Neutrophilic Cytoplasmic Autoantibodies. ANCAs target and attack a certain kind of white blood cells called neutrophils.

[0641] In some embodiments, the methods and systems described herein are used to treat ANCA vasculitis by administering to a patient an iPSC-derived Natural Killer cell that includes a polynucleotide site-specifically integrated in the genome of the cell using the methods described herein. Upon administering the iPSC-NK cell to the patient, the iPSC-NK cell is capable of removing native cells (e.g., B cells) that are responsible, at least in part, for the symptoms of ANCA vasculitis.

[0642] Systemic Lupus Erythematosus (SLE)/Lupus Nephritis (LN). Lupus is an autoimmune—a disorder in which the body's immune system attacks the body's own cells and organs.

[0643] In some embodiments, the methods and systems described herein are used to treat SLE/LN by administering to a patient an iPSC-derived Natural Killer cell that includes a polynucleotide site-specifically integrated in the genome of the cell using the methods described herein. Upon administering the iPSC-NK cell to the patient, the iPSC-NK cell is capable of removing native cells (e.g., B cells) that are responsible, at least in part, for the symptoms of SLE/LN.

[0644] Membranous Nephropathy (MN). MN is a kidney disease that affects the filters (glomeruli) of the kidney and can cause protein in the urine, as well as decreased kidney function and swelling. It can sometimes be called membranous glomerulopathy as well (these terms can be used interchangeably and mean the same thing).

[0645] In some embodiments, the methods and systems described herein are used to treat MN by administering to a patient an iPSC-derived Natural Killer cell that includes a polynucleotide site-specifically integrated in the genome of the cell using the methods described herein. Upon administering the iPSC-NK cell to the patient, the iPSC-NK cell is capable of removing native cells (e.g., B cells) that are responsible, at least in part, for the symptoms of MN.

[0646] C3 glomerulonephritis (C3GN). C3 glomerulopathy is a group of related conditions that cause the kidneys to malfunction. The major features of C3 glomerulopathy include high levels of protein in the urine (proteinuria), blood in the urine (hematuria), reduced amounts of urine, low levels of protein in the blood, and swelling in many areas of the body. Affected individuals may have particularly low levels of a protein called complement component 3 (or C3) in the blood.

[0647] In some embodiments, the methods and systems described herein are used to treat C3 glomerulopathy by administering to a patient an iPSC-derived Natural Killer cell that includes a polynucleotide site-specifically integrated in the genome of the cell using the methods described herein. Upon administering the iPSC-NK cell to the patient, the iPSC-NK cell is capable of removing native cells (e.g., B cells) that are responsible, at least in part, for the symptoms of C3 glomerulopathy.

[0648] Minimal Change Disease (MCD). Minimal change disease (MCD) is a condition that damages the blood vessels in kidneys, which can affect how well kidneys work. Minimal change disease (MCD) is one of the most common causes of idiopathic nephrotic syndrome in children. It accounts for 70% to 90% of children that present with nephrotic syndrome who are older than one year old as opposed to 10-15% of adults who present with nephrotic syndrome. The clinical signs of minimal change disease are proteinuria, edema, weight gain, and hypoalbuminemia.

[0649] In some embodiments, the methods and systems described herein are used to treat MCD by administering to a patient an iPSC-derived Natural Killer cell that includes a polynucleotide site-specifically integrated in the genome of the cell using the methods described herein. Upon administering the iPSC-NK cell to the patient, the iPSC-NK cell is capable of removing native cells (e.g., B cells) that are responsible, at least in part, for the symptoms of MCD.

### 6.13. Methods of Treatment

[0650] In another aspect, methods of treatment are presented. The method comprises administering an effective amount of the pharmaceutical composition comprising the nucleic acid construct or vectorized nucleic acid construct described above to a patient in need thereof. In some embodiments, the system (e.g., any of the systems described herein) are delivered to a cell ex vivo and the cell is then administered to the subject. In some embodiments, the systems (e.g., any of the systems described herein) are delivered to a patient, thereby delivering to a cell in vivo.

[0651] DNA or RNA viral vectors can be administered directly to patients (in vivo) or they can be used to treat cells in vitro, and the modified cells may optionally be administered to patients (ex vivo). Conventional viral based systems to be used herein could include retroviral, lentivirus, adenoviral, adeno-associated and herpes simplex virus vectors for gene transfer. Integration in the host genome is possible with the retrovirus, lentivirus, and adeno-associated virus gene transfer methods, often resulting in long term expression of the inserted transgene. Additionally, high transduction efficiencies have been observed in many different cell types and target tissues.

[0652] In some embodiments, the co-delivery system described herein (e.g., a gene editor construct packaged in a LNP and a donor template packaged in a vector) is administered intravenously. In some embodiments, the co-delivery system described herein (e.g., a gene editor construct packaged in a LNP and a donor template packaged in a vector) is administered intrathecally. In some embodiments, the co-delivery system described herein (e.g., a gene editor construct packaged in a LNP and a donor template packaged in a vector) is administered by intracerebral ventricular injection. In some embodiments, the co-delivery system described herein (e.g., a gene editor construct packaged in a LNP and a donor template packaged in a vector) is administered by intracisternal magna administration. In some embodiments, the co-delivery system described herein (e.g., a gene editor construct packaged in a LNP and a donor template packaged in a vector) is administered by intravitreal injection.

[0653] Methods of non-viral delivery of the donor DNA template described herein include lipofection, nucleofection, microinjection, biolistics, virosomes, liposomes, immunoliposomes, polycation or lipid:nucleic acid conjugates, naked DNA, artificial virions, and agent-enhanced uptake of DNA. Lipofection is described in e.g., U.S. Pat. Nos. 5,049,386, 4,946,787; and 4,897,355) and lipofection reagents are sold commercially (e.g., Transfectam™ and Lipofectin™). Cationic and neutral lipids that are suitable for efficient receptor-recognition lipofection of polynucleotides include those of Felgner, WO 91/17424; WO 91/16024. Delivery can be to cells (e.g. in vitro or ex vivo administration) or target tissues (e.g. in vivo administration).

### 6.13.1. mRNA Delivery

[0654] Another useful method to deliver proteins, enzymes, and guides comprises transfection of messenger RNA (mRNA). Examples of mRNA delivery methods and compositions that may be utilized in the present disclosure including, for example, PCT/US2014/028330, U.S. Pat. No. 8,822,663B2, NZ700688A, ES2740248T3, EP2755693A4, EP2755986A4, WO2014152940A1, EP3450553B1, BR112016030852A2, and EP3362461A1. Expression of CRISPR systems in particular is described by WO2020014577. Each of these publications are incorporated herein by reference in their entireties. Additional disclosure hereby incorporated by reference can be found in Kowalski et al., “Delivering the Messenger: Advances in Technologies for Therapeutic mRNA Delivery,” Mol Therap., 2019; 27(4): 710-728.

### 7. EXAMPLES

### 7.1. Example 1: Delivery of Gene Editor Polynucleotide Sequence Packaged in LNP and Donor Template Packaged in AAV

[0655] A gene editor polynucleotide construct is packaged into a LNP (FIG. 1), wherein the gene editor polynucleotide sequence comprises a polynucleotide sequence encoding a prime editor protein linked to an integrase via peptide linker a polynucleotide sequence encoding an attachment site-containing guide RNA (atgRNA); a polynucleotide sequence encoding a nickase guide RNA (ngRNA).

[0656] A donor template polynucleotide construct is packaged in an AAV vector (FIG. 2).

[0657] Co-administration of the gene editor construct packaged LNP and the donor template packaged AAV co-delivers the gene editor construct to a cell cytoplasm and the donor template to a cell nucleus. By use of programmable genome editing to place integrase landing site at a desired location in the genome, the direct activity of the associated integrase to the specific genomic site is guided. Gene editor construct expression, with template co-delivery, results in integration of template “cargo” at a precisely defined target location.

### 7.2. Example 2: Delivery of Gene Editor Polynucleotide Sequence Packaged in LNP and Donor Template Capable of Self-Circularization Packaged in AAV

[0658] A gene editor polynucleotide construct is packaged into a LNP (FIG. 1), wherein the gene editor polynucleotide sequence comprises a polynucleotide sequence encoding a prime editor protein linked to an integrase via peptide linker a polynucleotide sequence encoding an attachment site-containing guide RNA (atgRNA); a polynucleotide sequence encoding a nickase guide RNA (ngRNA).

[0659] A donor template polynucleotide construct is packaged in an AAV vector (FIG. 2).

[0660] Co-administration of the gene editor construct packaged LNP and the donor template packaged AAV co-delivers the gene editor construct to a cell cytoplasm and the donor template to a cell nucleus. Integrase-mediated self-circularization of donor template occurs at integration target recognition sites within the AAV genome (FIG. 3). By use of programmable genome editing to place an orthogonal integrase landing site (i.e., distinct att site from att sites used for self-circularization) at a desired location in the genome, the direct activity of the associated integrase to the specific genomic site is guided. Gene editor construct expression, with template co-delivery and integrase-mediated circularization of template, results in integration of template “cargo” at a precisely defined target location.

### 7.3. Example 3: Delivery of Gene Editor Polynucleotide Sequence Packaged in LNP and atgRNA, ngRNA, and Donor Template Co-Packaged in AAV

[0661] A gene editor polynucleotide construct is packaged into a LNP (FIG. 4), wherein the gene editor polynucleotide sequence comprises a polynucleotide sequence encoding a prime editor protein linked to an integrase via peptide linker.

[0662] A polynucleotide sequence encoding an attachment site-containing guide RNA (atgRNA), a polynucleotide sequence encoding a nicking guide RNA (ngRNA), and donor template are packaged in an AAV vector (FIG. 4).

[0663] Co-administration of the gene editor construct packaged LNP and the atgRNA, ngRNA, donor template packaged AAV co-delivers the gene editor construct to a cell. Integrase-mediated self-circularization of donor template occurs at integration target recognition sites within the AAV genome (FIG. 3). By use of programmable genome editing to place an orthogonal integrase landing site (i.e., distinct att site from att sites used for self-circularization) at a desired location in the genome, the direct activity of the associated integrase to the specific genomic site is guided. Gene editor construct expression, with atgRNA, ngRNA, and template co-delivery and integrase-mediated circularization of template, results in integration of template “cargo” at a precisely defined target location.

### 7.4. Example 4: Delivery of Gene Editor Polynucleotide Sequence and ngRNA Packaged in LNP and atgRNA and Donor Template Co-Packaged in AAV

[0664] A gene editor polynucleotide construct and a nicking guide RNA (ngRNA) are packaged into a LNP (FIG. 5), wherein the gene editor polynucleotide sequence comprises a polynucleotide sequence encoding a prime editor protein linked to an integrase via peptide linker.

[0665] A polynucleotide sequence encoding an attachment site-containing guide RNA (atgRNA) and donor template are packaged in an AAV vector (FIG. 5).

[0666] Co-administration of the gene editor construct and ngRNA packaged LNP and the atgRNA, donor template packaged AAV co-delivers the gene editor construct to a cell. Integrase-mediated self-circularization of donor template occurs at integration target recognition sites within the AAV genome (FIG. 3). By use of programmable genome editing to place an orthogonal integrase landing site (i.e., distinct att site from att sites used for self-circularization) at a desired location in the genome, the direct activity of the associated integrase to the specific genomic site is guided. Gene editor construct expression, with atgRNA, ngRNA, and template co-delivery and integrase-mediated circularization of template, results in integration of template “cargo” at a precisely defined target location.

### 7.5. Example 5: Intramolecular Circularization of Plasmid and Packaged AAV Genomes

[0667] Three self-complementary AAV (scAAV) genomes were designed and generated to verify recombinase/integrase-mediated intramolecular circularization of a DNA cargo from within a linear AAV genome (FIGS. 6A-6B). Circularization of a scAAV genome is mediated by one of Cre, FLPe (thermostable mutant), or Bxb1. Further, the scAAV genomes are comprised of a DNA cargo of interest (“payload”) and an attP site (GT central dinucleotide for circularization orthogonality) for gene insertion into a genome placed attB beacon site. Expected recombinase/integrase-mediated intramolecular circularization products are illustrated in FIG. 7. A universal ddPCR probe capable of binding any linear or circularized AAV genome was designed, wherein the universal ddPCR probe is designed to only give signal upon cognate recombinase/integrase mediated circularization (FIGS. 8A-8B). Circularization products are amplified by use of a circle junction PCR primer set that is designed to amplify only circular products due to primer direction constraints. To confirm Bxb1 mediated circularization specifically, an attR scar quencher-fluorophore probe was designed. In addition, a template reference primer set was designed and generated to quantify total template DNA (linear or circular confirmation) (FIGS. 8A-8B).

[0668] Intracellular circularization of either plasmid or packaged AAV genomes were screened in HEK293 cells (35K cells per well) (FIG. 9). Plasmids (25 fmol pDNA=1× or 50 fmol pDNA=2×) encoding one of Cre, FLPe, or Bxb1 were transfected by Lipofectamine 3000. Plasmid genome substrates were transfected at a dose of 1E10 copies per well using Lipofectamine 3000 (FIG. 9). Additionally, AAV genomes were packaged in AAV-DJ capsids and delivered at a dose of 3E5 genomes per cell or 1E10 genomes per well. Circularization ddPCR analysis was conducted three days post transfection.

[0669] FIG. 10 demonstrates circularization of AAV pDNA and packaged AAV genomic DNA for both 1×Bxb1 and 2×Bxb1 conditions (confirmed by use of attR ddPCR primer set). Further, replicates that lacked either Bxb1 or AAV pDNA substrate demonstrated insignificant circularization. All three of the Cre-, FLPe-, and Bxb1-targeted AAV pDNA substrates demonstrated circularization upon cognate recombinase/integrase introduction, as confirmed by using the universal ddPCR probe (FIG. 11). Moreover, Cre-, FLPe-, and Bxb1-mediated circularization of packaged AAV DJ genomes substrates were demonstrated and confirmed using the universal ddPCR probe (FIG. 12).

[0670] As shown in FIG. 13, the Bxb1-mediated attR scar probe provided similar percent circularization quantification compared to the universal probe.

### 7.6. Example 6: In Vitro Beacon Placement in Primary Mouse Hepatocytes and Primary Human Hepatocytes Using mRNA and AAV for Co-Delivery

[0671] This example assessed the efficiency of in vitro beacon placement in primary human hepatocytes using mRNA delivering of a polynucleotide encoding a gene editor polynucleotide construct and AAV to deliver the first and second atgRNA. See FIG. 15 for a non-limiting example of a dual atgRNA-mediated insertion of an integration recognition site.

[0672] In the mouse experiments, the mRNA and AAV were delivered into the primary mouse hepatocytes (PMH) using (i) concurrent delivery (“co-dose”), (ii) AAV delivery followed by a “1-day delay” before delivery of the mRNA, or (iii) AAV delivery followed by a “2-day delay” before delivery of the mRNA. Beacon placement was then assessed using next-generation sequencing of DNA isolated from cells subjected to the delivery conditions mentioned above. The mRNA encoding the gene editor polynucleotide construct was delivered in various amounts per well: 2000 ng, 1000 ng, 500 ng, 250 ng, 125 ng, 62.5 ng, and 31.25 ng. AAV encoding the first and second atgRNA (see Table 12). The primary mouse hepatocyte data is shown in FIG. 16 and the human primary hepatocyte data is shown in FIG. 17.

TABLE 12
atgRNAs

| SEQ | | | |
|---|---|---|---|
| ID | | | |
| NO: | Target | Name | Sequence |
| 559 | Mouse | AAV-mNolc1- | GACGCGTTTTACCCGGAGCAGTTTAAGAGCTATGCTGGA |
| | Nolc1 | F | GAACACATAGCAAGTTTAAATAAGGCTAGTCCGTTATCA |
| | | (AAVG023) | ACTTGAAAAAGTGGCACCGAGTCGGTGCACGACGGAGAC |
| | | | CGCCGTCGTCGACAAGCCTCCGGGTAAAACG |
| 560 | Mouse | AAV-mNolc1- | ACAAGGGGATAAAGGTCGCTGTTTAAGAGCTATGCTGGA |
| | Nolc1 | R | AACAGCATAGCAAGTTTAAATAAGGCTAGTCCGTTATCA |
| | | | ACTTGAAAAAGTGGCACCGAGTCGGTGCACGACGGCGGT |
| | | | CTCCGTCGTCAGGATCATGACCTTTATCCCC |
| 561 | Human | AAV-hF9-F | CTTGTATGCCCCGAGAAGTGGTTTTAGAGCTAGAAATAG |
| | Factor IX | (AAVG048) | CAAGTTAAAATAAGGCTAGTCCGTTATCAACTTGAAAAA |
| | | | GTGGCACCGAGTCGGTGCACGACGGAGACCGCCGTCGTC |
| | | | GACAAGCCTTCTCGGGGCATA |
| 562 | Human | AAV-hF9-R | TATATATACTTGCTAGGGCTGTTTTAGAGCTAGAAATAG |
| | Factor IX | (AAVG048) | CAAGTTAAAATAAGGCTAGTCCGTTATCAACTTGAAAAA |
| | | | GTGGCACCGAGTCGGTGCACGACGGCGGTCTCCGTCGTC |
| | | | AGGATCATCCTAGCAAGTATA |

[0673] As shown in FIG. 16, in primary mouse hepatocytes (PMH) delivering the first atgRNAs (SEQ ID NO: 543) and the second atgRNA (SEQ ID NO: 544) using AAV at day 0 and then delivering the mRNA encoding the gene editing polynucleotide construct at day 2 (“2 day delay”) resulted in greater than 10% beacon placement for each amount of mRNA tested. Surprisingly, a 2 day delay resulted in greater beacon placement than either no delay (“co-dose) or a 1 day delay.

[0674] As shown in FIG. 17, in primary human hepatocytes (PHH), using AAV to deliver the first atgRNA (SEQ ID NO: 545) and the second atgRNA (SEQ ID NO: 546) and mRNA to deliver the gene editing polynucleotide construct resulted in about 17% beacon placement.

[0675] Taken together, this data showed robust ex vivo beacon placement in primary mouse and primary human hepatocytes.

### 7.7. Example 7: In Vivo Beacon Placement with mRNA+AAV Guide

[0676] In vivo beacon placement in mice was assessed using AAV to deliver the first and second atgRNAs and mRNA to delivery the gene editing polynucleotide construct.

[0677] In these experiments, mice were administered AAV containing the first atgRNA (SEQ ID NO: 543; Table 12) and the second atgRNA (SEQ ID NO: 544) targeting the Nolc1 locus at 3E11 to 1E12 vector genomes (vg) per animal two 2 weeks prior to administration of the mRNA containing the gene editing polynucleotide construct (see FIG. 18). mRNA was delivered using various LNP formulations (e.g., LNP #F1, LNP #F2, and LNP #F3) at concentrations ranging from 5 mg/kg to 0.5 mg/kg via intravenous injection (see FIG. 18). After delivery of the mRNA, liver tissue was harvested, genomic DNA was isolated, and beacon efficiency was assessed by NGS. As shown in FIG. 18, three conditions resulted in vivo beacon placement efficiency greater than 10%.

[0678] Taken together, this data provided proof-of-concept for successful in vivo beacon placement using AAV to deliver the first and second atgRNA and LNPs to deliver the mRNA encoding the gene editor polynucleotide construct.

### 7.8. Example 8: In Vivo Integration in Mice Using AAV to Deliver the Template Polynucleotide and Adenovirus to Deliver BxB1

[0679] In vivo integration efficiency in AttP mice was assessed using adenovirus to deliver an integrase (e.g., Bxb1) and an AAV to deliver the template polynucleotide.

[0680] For these experiments, the adenovirus (i.e., adenovirus containing polynucleotide encoding the integrase) and the AAV (i.e., AAV containing the template polynucleotide and an attB site) were administered to mice containing dual AttP sites integrated in to the Rosa26 locus (B6.RosaBxb-GT/GA; female, Strain #036152). The Rosa26 locus included a first AttP site comprising a GT dinucleotide and a second AttP site comprising a GA dinucleotide. The AAV was a scAAV8 containing a vector having a template polynucleotide and a 38 bp GT AttB site. The Adenovirus was an adenovirus-type 5 (Ad5) containing a polynucleotide encoding Bxb1 (“Bxb1 AdV”) (SEQ ID NO: 563; Table 14). Mice were administered the adenovirus and AAV according to the experimental details in Table 13.

TABLE 13
Experimental Details for assessment of in vivo integration efficiency

| | | Bxb1 AdV dose | Cargo AAV | | Volume | Conc. | Time |
|---|---|---|---|---|---|---|---|
| Group | n | (vg/animal) | Dose (vg/animal) | Route | (ul) | (vg/ml) | points |
| 1 | 1F, 2M | vehicle | | IV | 100 | | Liver |
| 2 | 5 | 3E10 | 1E12 | IV | 100 | 3E11+1E13 | punches |
| 3 | 5 | 1E11 | 1E12 | IV | 100 | 1E12+1E13 | at 10 |
| | | | | | | | days post- |
| | | | | | | | dose |

TABLE 14
Adenovirus Vector

| Vectors | Sequence |
|---|---|
| Bxb1 AdV | TCGCGCGTTTCGGTGATGACGGTGAAAACCTC |
| (SEQ ID | TGACACATGCAGCTCCCGGAGACGGTCACAGC |
| NO: 563) | TTGTCTGTAAGCGGATGCCGGGAGCAGACAAG |
| | CCCGTCAGGGCGCGTCAGCGGGTGTTGGCGGG |
| | TGTCGGGGCTGGCTTAACTATGCGGCATCAGA |
| | GCAGATTGTACTGAGAGTGCACCATATGCGGT |
| | GTGAAATACCGCACAGATGCGTAAGGAGAAAA |
| | TACCGCATCAGGCGCCATTCGCCATTCAGGCT |
| | GCGCAACTGTTGGGAAGGGCGATCGGTGCGGG |
| | CCTCTTCGCTATTACGCCAGCTGGCGAAAGGG |
| | GGATGTGCTGCAAGGCGATTAAGTTGGGTAAC |
| | GCCAGGGTTTTCCCAGTCACGACGTTGTAAAA |
| | CGACGGCCAGTGAATTCGAGCTCTCGCTATTA |
| | CTTGGCCACTCCCTCTCTGCGCGCTCGCTCGC |
| | TCACTGAGGCCGGGCGACCAAAGGTCGCCCGA |
| | CGCCCGGGCTTTGCCCGGGCGGCCTCAGTGAG |
| | CGAGCGAGCGCGCAGAGAGGGAGTGGCCAACT |
| | CCATCACTAGGGGTTCCTCACTGCCCGCAGAT |
| | CTACTAGTGGCTTGTCGACGACGGCGGTCTCC |
| | GTCGTCAGGATCATTAGGTCAGTGAAGAGAAG |
| | AACAAAAAGCAGCATATTACAGTTAGTTGTCT |
| | TCATCAATCTTTAAATATGTTGTGTGGTTTTT |
| | CTCTCCCTGTTTCCACAGTTATGGGCAACAGC |
| | TTCAGCACCAGCGCCTTCGGCCCTGTGGCCTT |
| | TTCTCTGGGCCTCCTGCTCGTGCTGCCTGCCG |
| | CTTTTCCAGCTCCTGTGTTCACCCTGGAAGAT |
| | TTCGTGGGAGATTGGCGGCAGACCGCCGGCTA |
| | CAACCTGGACCAAGTGCTGGAACAGGGCGGAG |
| | TGTCCAGCCTGTTTCAGAACCTGGGCGTCTCC |
| | GTGACCCCTATCCAGCGGATCGTGCTGAGCGG |
| | CGAGAACGGCCTGAAAATCGACATCCATGTGA |
| | TTATCCCCTACGAGGGCCTGAGCGGAGATCAG |
| | ATGGGCCAGATCGAGAAAATCTTCAAGGTGGT |
| | GTACCCCGTCGACGACCACCACTTCAAGGTGA |
| | TCCTGCACTACGGCACCCTGGTGATCGACGGC |
| | GTTACCCCTAACATGATCGACTACTTCGGCAG |
| | ACCCTATGAGGGAATTGCCGTGTTCGACGGCA |
| | AGAAAATCACCGTGACCGGCACACTGTGGAAC |
| | GGCAACAAGATCATCGATGAGCGCCTGATCAA |
| | CCCAGACGGCAGCCTGCTGTTCAGAGTGACAA |
| | TCAATGGCGTGACAGGCTGGAGACTTTGTGAA |
| | AGAATCCTGGCCGGTTCTGGCGAGGGCAGAGG |
| | ATCTCTGCTGACATGCGGCGATGTGGAAGAGA |
| | ATCCTGGACCTGCTATGAAAATCGAGTGCAGA |
| | ATTACAGGCACACTGAACGGAGTTGAATTCGA |
| | GCTGGTCGGCGGAGGCGAGGGCACACCTGAGC |
| | AGGGCAGAATGACCAACAAGATGAAAAGCACC |
| | AAGGGCGCCCTGACCTTTTCTCCTTACCTGCT |
| | GAGCCACGTGATGGGCTATGGCTTCTACCACT |
| | TCGGCACCTACCCCAGCGGCTATGAAAACCCC |
| | TTCCTGCATGCTATCAACAACGGAGGCTACAC |
| | CAATACCAGAATCGAGAAGTACGAGGACGGCG |
| | GCGTGCTGCACGTGTCCTTCAGCTACAGATAC |
| | GAGGCCGGCAGAGTGATCGGCGACTTCAAGGT |
| | GGTGGGCACAGGATTTCCAGAAGATAGCGTGA |
| | TCTTCACCGACAAGATCATCCGGAGCAACGCC |
| | ACCGTGGAACACCTGCACCCCATGGGCGATAA |
| | TGTGCTGGTGGGCTCCTTTGCTAGAACATTCT |
| | CCCTGCGGGACGGCGGATACTACAGCTTCGTG |
| | GTCGACAGCCACATGCACTTCAAGTCTGCCAT |
| | CCACCCTTCTATCCTGCAGAACGGCGGACCTA |
| | TGTTCGCCTTCCGGCGGGTGGAGGAACTCCAC |
| | AGCAACACCGAGCTGGGCATCGTGGAATACCA |
| | GCACGCCTTTAAGACCCCTATCGCCTTCGCCA |
| | GAAGCAGAGCCAGGTGAGAGTTTAAACCCGCT |
| | GATCAGCCTCGACTGTGCCTTCTAGTTGCCAG |
| | CCATCTGTTGTTTGCCCCTCCCCCGTGCCTTC |
| | CTTGACCCTGGAAGGTGCCACTCCCACTGTCC |
| | TTTCCTAATAAAATGAGAAAATTGCATCGCAT |
| | TGTCTGAGTAGGTGTCATTCTATTCTGGGGGG |
| | TGGGGTGGGGCAGGACAGCAAGGGGGAGGATT |
| | GGGAAGACAATAGCAGGCATGCTGGGGATGCG |
| | GTGGGCTCTATGGACTAGTAGATCTCACTGCC |
| | CGCCCACTCCCTCTCTGCGCGCTCGCTCGCTC |
| | ACTGAGGCCGGGCGACCAAAGGTCGCCCGACG |
| | CCCGGGCTTTGCCCGGGCGGCCTCAGTGAGCG |
| | AGCGAGCGCGCAGAGAGGGATGCATTAATGGG |
| | ATCCTCTAGAGTCGACCTGCAGGCATGCAAGC |
| | TTGGCGTAATCATGGTCATAGCTGTTTCCTGT |
| | GTGAAATTGTTATCCGCTCACAATTCCACACA |
| | ACATACGAGCCGGAAGCATAAAGTGTAAAGCC |
| | TGGGGTGCCTAATGAGTGAGCTAACTCACATT |
| | AATTGCGTTGCGCTCACTGCCCGCTTTCCAGT |
| | CGGGAAACCTGTCGTGCCAGCTGCATTAATGA |
| | ATCGGCCAACGCGCGGGGAGAGGCGGTTTGCG |
| | TATTGGGCGCTCTTCCGCTTCCTCGCTCACTG |
| | ACTCGCTGCGCTCGGTCGTTCGGCTGCGGCGA |
| | GCGGTATCAGCTCACTCAAAGGCGGTAATACG |
| | GTTATCCACAGAATCAGGGGATAACGCAGGAA |
| | AGAACATGTGAGCAAAAGGCCAGCAAAAGGCC |
| | AGGAACCGTAAAAAGGCCGCGTTGCTGGCGTT |
| | TTTCCATAGGCTCCGCCCCCCTGACGAGCATC |
| | ACAAAAATCGACGCTCAAGTCAGAGGTGGCGA |
| | AACCCGACAGGACTATAAAGATACCAGGCGTT |
| | TCCCCCTGGAAGCTCCCTCGTGCGCTCTCCTG |
| | TTCCGACCCTGCCGCTTACCGGATACCTGTCC |
| | GCCTTTCTCCCTTCGGGAAGCGTGGCGCTTTC |
| | TCATAGCTCACGCTGTAGGTATCTCAGTTCGG |
| | TGTAGGTCGTTCGCTCCAAGCTGGGCTGTGTG |
| | CACGAACCCCCCGTTCAGCCCGACCGCTGCGC |
| | CTTATCCGGTAACTATCGTCTTGAGTCCAACC |
| | CGGTAAGACACGACTTATCGCCACTGGCAGCA |
| | GCCACTGGTAACAGGATTAGCAGAGCGAGGTA |
| | TGTAGGCGGTGCTACAGAGTTCTTGAAGTGGT |
| | GGCCTAACTACGGCTACACTAGAAGGACAGTA |
| | TTTGGTATCTGCGCTCTGCTGAAGCCAGTTAC |
| | CTTCGGAAAAAGAGTTGGTAGCTCTTGATCCG |
| | GCAAACAAACCACCGCTGGTAGCGGTGGTTTT |
| | TTTGTTTGCAAGCAGCAGATTACGCGCAGAAA |
| | AAAAGGATCTCAAGAAGATCCTTTGATCTTTT |
| | CTACGGGGTCTGACGCTCAGTGGAACGAAAAC |
| | TCACGTTAAGGGATTTTGGTCATGAGATTATC |
| | AAAAAGGATCTTCACCTAGATCCTTTTAAATT |
| | AAAAATGAAGTTTTAAATCAATCTAAAGTATA |
| | TATGAGTAAACTTGGTCTGACAGTTACCAATG |
| | CTTAATCAGTGAGGCACCTATCTCAGCGATCT |
| | GTCTATTTCGTTCATCCATAGTTGCCTGACTC |
| | CCCGTCGTGTAGATAACTACGATACGGGAGGG |
| | CTTACCATCTGGCCCCAGTGCTGCAATGATAC |
| | CGCGAGACCCACGCTCACCGGCTCCAGATTTA |
| | TCAGCAATAAACCAGCCAGCCGGAAGGGCCGA |
| | GCGCAGAAGTGGTCCTGCAACTTTATCCGCCT |
| | CCATCCAGTCTATTAATTGTTGCCGGGAAGCT |
| | AGAGTAAGTAGTTCGCCAGTTAATAGTTTGCG |
| | CAACGTTGTTGCCATTGCTACAGGCATCGTGG |
| | TGTCACGCTCGTCGTTTGGTATGGCTTCATTC |
| | AGCTCCGGTTCCCAACGATCAAGGCGAGTTAC |
| | ATGATCCCCCATGTTGTGCAAAAAAGCGGTTA |
| | GCTCCTTCGGTCCTCCGATCGTTGTCAGAAGT |
| | AAGTTGGCCGCAGTGTTATCACTCATGGTTAT |
| | GGCAGCACTGCATAATTCTCTTACTGTCATGC |
| | CATCCGTAAGATGCTTTTCTGTGACTGGTGAG |
| | TACTCAACCAAGTCATTCTGAGAATAGTGTAT |
| | GCGGCGACCGAGTTGCTCTTGCCCGGCGTCAA |
| | TACGGGATAATACCGCGCCACATAGCAGAACT |
| | TTAAAAGTGCTCATCATTGGAAAACGTTCTTC |
| | GGGGCGAAAACTCTCAAGGATCTTACCGCTGT |
| | TGAGATCCAGTTCGATGTAACCCACTCGTGCA |
| | CCCAACTGATCTTCAGCATCTTTTACTTTCAC |
| | CAGCGTTTCTGGGTGAGCAAAAACAGGAAGGC |
| | AAAATGCCGCAAAAAAGGGAATAAGGGCGACA |
| | CGGAAATGTTGAATACTCATACTCTTCCTTTT |
| | TCAATATTATTGAAGCATTTATCAGGGTTATT |
| | GTCTCATGAGCGGATACATATTTGAATGTATT |
| | TAGAAAAATAAACAAATAGGGGTTCCGCGCAC |
| | ATTTCCCCGAAAAGTGCCACCTGACGTCTAAG |
| | AAACCATTATTATCATGACATTAACCTATAAA |
| | AATAGGCGTATCACGAGGCCCTTTCGTC |

[0681] Ten days after administration of the AdV and AAV viruses, liver punches were collected and genomic DNA was isolated. ddPCR of the genomic DNA was used to assess integration efficiency.

[0682] As shown in FIG. 19, administering the AAV and AdV resulted in in vivo integration of the donor polynucleotide template into the AttP mice. In particular, 3E10 vg/animal BxB1 AdV resulted in about 7% in vivo integration efficiency (see FIG. 19). Administering increased amounts of BxB1 AdV, 1E11 vg/animal, resulted in higher integration efficiency, about 11%, in AttP mice than with lower amount of 3E10 vg/animal (see FIG. 19).

[0683] Overall, this data establishes proof-of-concept for in vivo integration using an adenovirus to deliver and drive expression of Bxb1 and an AAV to deliver the template polynucleotide to be integrated into a mammalian genome, in this case, the mouse genome.

### 7.9. Example 9: In Vivo Beacon Placement in Neonatal Mice Using Split LNP

[0684] In vivo beacon placement was assessed in neonatal mice following administration of a single dose of a mixture of two LNPs. The first LNP contained mRNA encoding a prime editing system and a first synthetic atgRNA (atgRNA1). The mRNA and atgRNA1 were included at 1:1 ratio in the first LNP. The second LNP contained mRNA encoding a prime editing system and a second synthetic atgRNA (atgRNA2). The mRNA and atgRNA2 were included at a 1:1 ratio in the second LNP. Each of the first and second atgRNAs targeted the mouse Nolc1 locus and each encoded a portion of an integration recognition site (a “beacon”). AtgRNA1 and atgRNA2 together included a 6 bp overlap. The first and second LNPs were combined 1:1 as mixture prior to administration. The first atgRNA and second atgRNA are provide in Table 15, where the atgRNA include one or more 2′O-methyl modifications and one or more phosphorothioate linkages.

TABLE 15
atgRNAs

| SEQ | | | |
|---|---|---|---|
| ID | | | |
| NO: | Target | Name | Sequence |
| 564 | Mouse | mNolc1-F | mG*mA*mC*rGrCrGrUrUrUrUrArCrCrCrGrGrA |
| | Nolc1 | (synthetic | rGrCrArGrUrUrUrUrArGrAmGmCmUmAmGmAmAm |
| | | guide, 6 bp | AmUmAmGmCrArArGrUrUrArArArArUrArArGrG |
| | | overlap) | rCrUrArGrUrCrCrGrUrUrArUrCrAmAmCmUmUm |
| | | | GmAmAmAmAmAmGmUmGmGmCmAmCmCmGmAmGmUmC |
| | | | mGmGmUmGmCrArGrArCrCrGrCrCrGrUrCrGrUr |
| | | | CrGrArCrArArGrCrCrUrCrCrGrGrGrUrArArA |
| | | | *mA*mC*mG |
| 565 | Mouse | mNolc1-R | mA*mC*mA*rArGrGrGrGrArUrArArArGrGrUrC |
| | Nolc1 | (synthetic | rGrCrUrGrUrUrUrUrArGrAmGmCmUmAmGmAmAm |
| | | guide, 6 bp | AmUmAmGmCrArArGrUrUrArArArArUrArArGrG |
| | | overlap) | rCrUrArGrUrCrCrGrUrUrArUrCrAmAmCmUmUm |
| | | | GmAmAmAmAmAmGmUmGmGmCmAmCmCmGmAmGmUmC |
| | | | mGmGmUmGmCrCrGrGrUrCrUrCrCrGrUrCrGrUr |
| | | | CrArGrGrArUrCrArUrGrArCrCrUrUrUrArUrC |
| | | | *mC*mC*mC |

[0685] The LNP mixture was administered to the neonatal mice (2-5 day old CD-1 mice) according to the experimental details in Table 16.

TABLE 16
Experimental details for in vivo beacon
placement in neonatal mice.

| | | | Dose | | Volume | Conc. | |
|---|---|---|---|---|---|---|---|
| | | | (mg/ | | (ml/ | (mg/ | |
| Group | n | Treatment | kg) | Route | kg) | ml) | Time points |
| 1 | 5 | vehicle | | IV | 5 | | Whole liver |
| 2 | 3 | LNP | 1 | IV | 5 | 0.2 | on day 8 |
| 3 | 4 | LNP | 3 | IV | 5 | 0.6 | post-dose |
| | | | | | | | (168 hours) |
| 4 | 5 | vehicle | | IV | 5 | | Liver |
| 5 | 5 | LNP | 1 | IV | 5 | 0.2 | punches |
| 6 | 5 | LNP | 3 | IV | 5 | 0.6 | (one 8 mm |
| | | | | | | | punch from |
| | | | | | | | each lobe) |
| | | | | | | | at 6 weeks |
| | | | | | | | post-dose |

[0686] Fight days after administration of the LNP mixture in vivo beacon placement was assessed. In particular, at day 8 post administration, liver samples (either whole liver for groups 1-3 or liver punches from each lobe for groups 4-6 (see Table 13)) were collected and genomic DNA was isolated. Beacon placement was detected using ddPCR and NGS.

[0687] As shown in FIG. 20A, ddPCR revealed about 100 beacon placement (in Nolc1 alleles) following administration of a 3 mg/kg dose of the LNP mixture. Confirmation of beacon placement using NGS showed about 700 beacon placement (in Nolc1 alleles) following administration of a 3 mg/kg dose of the LNP mixture (see FIG. 20B). In order to determine what percentage of the integrated beacons included the expected integration recognition site (“perfect beacon”), an NGS-based assay was used to make this assessment. As shown in FIG. 20C, about 1% of the integrated beacons contained the expected integration recognition site.

[0688] Neonates were also assessed at six weeks after administration of the LNP mixture. Beacon placement was detected using ddPCR and NGS. As shown in FIG. 21A., at six weeks post administration, ddPCR revealed about 4% beacon placement (in Nolc1 alleles) for a 3 mg/kg dose of the LNP mixture. Confirmation of beacon placement using NGS showed about 15% beacon placement (in Nolc1 alleles) for a 3 mg/kg dose of the LNP mixture (see FIG. 21B). Assessment of the percent of integrated beacons that included the expected integration recognition site (“perfect beacon”) revealed that about 3.5% of beacons were comprised of perfect beacons (see FIG. 21C).

[0689] Overall, this data demonstrated successful in vivo site-specific integration of an integration recognition site. In particular, this data showed that a split LNP approach can be used for site-specifically integrating an integration recognition site in vivo in a mammalian genome, in this case neonatal mice.

### 7.10. Example 10: In Vivo Beacon Placement in Mice Using Split LNP

[0690] In vivo beacon placement was assessed in adult mice using a single dose mixture of two LNPs. The first LNP contained mRNA encoding a prime editing system and a first synthetic atgRNA (atgRNA1). The mRNA and atgRNA1 were included at different ratios (e.g., 1:0.5, 1:1, and 1:2) ratio in the first LNP. The second LNP contained mRNA encoding a prime editing system and a second synthetic atgRNA (atgRNA2). The mRNA and atgRNA2 were included at different ratios (e.g., 1:0.5, 1:1, and 1:2) ratio in the second LNP. Here, the first and second atgRNAs targeted mouse Factor IX (“mF9”) locus and each encoded a portion of an integration recognition site (“beacon”). Similar to Example 9, atgRNA1 and atgRNA2 together included a 6 bp overlap and were combined 1:1 as mixture prior to administration. The first atgRNA and second atgRNA are provide in Table 17, where the atgRNA include one or more 2′O-methyl modifications and one or more phosphorothioate linkages.

TABLE 17
atgRNAs

| SEQ | | | |
|---|---|---|---|
| ID | | | |
| NO: | Target | Name | Sequence |
| 566 | Mouse | mF9-F | mA*mG*mU*rGrArCrArGrUrGrCrCrArGrGrA |
| | Factor IX | (synthetic guide, | rUrCrArGrGrUrUrUrUrArGrAmGmCmUmAmGm |
| | | 6 bp overlap) | AmAmAmUmAmGmCrArArGrUrUrArArArArUrA |
| | | | rArGrGrCrUrArGrUrCrCrGrUrUrArUrCrAm |
| | | | AmCmUmUmGmAmAmAmAmAmGmUmGmGmCmAmCmC |
| | | | mGmAmGmUmCmGmGmUmGmCrArGrArCrCrGrCr |
| | | | CrGrUrCrGrUrCrGrArCrArArGrCrCrArUrC |
| | | | rCrUrGrGrCrArCmU*mG*mU |
| 567 | Mouse | mF9-R | mG*mU*mU*rGrArCrArUrCrArUrGrUrCrUrG |
| | Factor IX | (synthetic guide, | rGrArGrUrGrUrUrUrUrArGrAmGmCmUmAmGm |
| | | 6 bp overlap) | AmAmAmUmAmGmCrArArGrUrUrArArArArUrA |
| | | | rArGrGrCrUrArGrUrCrCrGrUrUrArUrCrAm |
| | | | AmCmUmUmGmAmAmAmAmAmGmUmGmGmCmAmCmC |
| | | | mGmAmGmUmCmGmGmUmGmCrCrGrGrUrCrUrCr |
| | | | CrGrUrCrGrUrCrArGrGrArUrCrArUrCrCrA |
| | | | rGrArCrArUrGrAmU*mG*mU |

[0691] In particular, the LNP mixture was administered to female CD-1 mice 6-8 weeks old according to the experimental details in Table 18.

TABLE 18
Experimental details for in vivo beacon placement in adult mice

| | | Treatment | | | | | |
|---|---|---|---|---|---|---|---|
| | | (ratio | Dose | | Volume | Conc. | Time |
| Group | n | mRNA:atgRNA1:atgRNA2) | (mg/kg) | Route | (ml/kg) | (mg/ml) | points |
| 1 | 5 | vehicle | | IV | 5 | | Terminal: |
| 2 | 5 | 1:0.25:0.25* | 3 | IV | 5 | 0.6 | liver |
| 3 | 5 | 1:0.5:0.5** | 3 | IV | 5 | 0.6 | punches on |
| 4 | 5 | 1:1:1*** | 3 | IV | 5 | 0.6 | day 8 |

*1:0.25:0.25 = mRNA:atgRNA1 1:0.5; mRNA:atgRNA2 1:0.5; LNPs mixed 1:1
**1:0.5:0.5 = mRNA:atgRNA1 1:1; mRNA:atgRNA2 1:1; LNPs mixed 1:1
***1:1:1 = mRNA:atgRNA1 1:2; mRNA:atgRNA2 1:2; LNPs mixed 1:1

[0692] Eight days after administration of the LNP mixture in vivo beacon placement was assessed. In particular, at day 8 post administration, liver samples (i.e., liver punches of each lobe (see Table 14)) were collected and genomic DNA was isolated. Beacon placement was detected using ddPCR and NGS.

[0693] As shown in FIG. 22A, ddPCR revealed about 0.8% beacon placement (in mF9 alleles) following administration of a 1:0.25:0.25 ratio of mRNA:atgRNA1:atgRNA2. Confirmation of beacon placement using NGS showed about 14% beacon placement (in mF9 alleles) following administration of the 1:0.25:0.25 ratio of mRNA:atgRNA1:atgRNA2 (see FIG. 22B). Similar to Example 9, an NGS-based assay was used to determined what percentages of the integrated beacons included the expected integration recognition site (“perfect beacon”). As shown in FIG. 22C, about 0.02% of the beacons placed in the mF9 locus were “perfect” beacons.

[0694] Overall, this data showed successful in vivo site-specific integration of an integration recognition site in adult mice. In particular, this data showed that the ratio of mRNA to atgRNA is an important consideration in determining efficacy of in vivo site-specific integration of an integration recognition site.

### 7.11. Example 11: Assessment of Engineered Integration Enzymes

[0695] Engineered integrases described in FIG. 23 (see also Table 26) were evaluated for ability to mediate programmable gene insertion (as indicated by Integration % (see FIG. 24B), which can also be as percent “Beacon Occupancy” (see FIG. 24C). Beacon placement was used as one of the controls (see FIG. 24A).

[0696] For these experiments, the engineered integrases were introduced into a primary human hepatocyte (PHH) at a high dose (750 ng) and a low dose (250 ng) along with a gene editor polypeptide (i.e., mRNA encoding a gene editor polypeptide (i.e., a Cas9 nickase fused to a reverse transcriptase (SEQ ID NO: 589)); an AAV expressing an atgRNA (the atgRNA comprising a spacer sequence with sequence complementarity to a sequence in the human factor IX locus, a scaffold, an RT template comprising an integration recognition site, and a primer binding site (See Table 19 below); and a donor polynucleotide template comprising a cognate integration recognition site. In these experiments, the AAV used to deliver the atgRNA also included the donor polynucleotide template sequence. The AAV sequence is AAVG048 (SEQ ID NO: 592; See Table 20).

TABLE 19

| SEQ | | | |
|---|---|---|---|
| ID | | | |
| NO: | Target | Name | Sequence |
| 587 | Human | Human | TATATATACTTGCTAGGGCTgtttta |
| | Factor | Factor | gagctagaaatagcaagttaaaataa |
| | IX | IX atg | ggctagtccgttatcaacttgaaaaa |
| | | spacer | gtggcaccgagtcggtgcacgacggc |
| | | 17F | ggtctccgtcgtcaggatcatCCTAG |
| | | | CAAGTATAttttttt |
| 588 | Human | Human | CTTGTATGCCCCGAGAAGTGgtttta |
| | Factor | Factor | gagctagaaatagcaagttaaaataa |
| | IX | IX atgRNA | ggctagtccgttatcaacttgaaaaa |
| | | spacer | gtggcaccgagtcggtgcacgacgga |
| | | 17R | gaccgccgtcgtcgacaagccTTCTC |
| | | | GGGGCATAttttttt |

TABLE 20

| SEQ | | |
|---|---|---|
| ID | | |
| NO: | Name | Sequence |
| 589 | mRNA- | AGGAAGCTCAGAATAAACGCTCAACTTTGGCCGGATCTGCCACCATGAAGAGAACC |
| | PL758 | GCCGACGGCAGCGAGTTCGAGAGCCCCAAGAAGAAGAGAAAGGTGGACAAGAAG |
| | (nCas9- | TACAGCATCGGCCTGGACATCGGCACCAACAGCGTGGGCTGGGCCGTGATCACC |
| | RT | GACGAGTACAAGGTGCCCAGCAAGAAGTTCAAGGTGCTGGGCAACACCGACAGAC |
| | | ACAGCATCAAGAAGAACCTGATCGGCGCCCTGCTGTTCGACAGCGGCGAGACCGC |
| | | CGAGGCCACCAGACTGAAGAGAACCGCCAGAAGAAGATACACCAGAAGAAAGAAC |
| | | AGAATCTGCTACCTGCAGGAGATCTTCAGCAACGAGATGGCCAAGGTGGACGACA |
| | | GCTTCTTCCACAGACTGGAGGAGAGCTTCCTGGTGGAGGAGGACAAGAAGCACGA |
| | | GAGACACCCCATCTTCGGCAACATCGTGGACGAGGTGGCCTACCACGAGAAGTAC |
| | | CCCACCATCTACCACCTGAGAAAGAAGCTGGTGGACAGCACCGACAAGGCCGACC |
| | | TGAGACTGATCTACCTGGCCCTGGCCCACATGATCAAGTTCAGAGGCCACTTCCTG |
| | | ATCGAGGGCGACCTGAACCCCGACAACAGCGACGTGGACAAGCTGTTCATCCAGC |
| | | TGGTGCAGACCTACAACCAGCTGTTCGAGGAGAACCCCATCAACGCCAGCGGCGT |
| | | GGACGCCAAGGCCATCCTGAGCGCCAGACTGAGCAAGAGCAGAAGACTGGAGAA |
| | | CCTGATCGCCCAGCTGCCCGGCGAGAAGAAGAACGGCCTGTTCGGCAACCTGATC |
| | | GCCCTGAGCCTGGGCCTGACCCCCAACTTCAAGAGCAACTTCGACCTGGCCGAGG |
| | | ACGCCAAGCTGCAGCTGAGCAAGGACACCTACGACGACGACCTGGACAACCTGCT |
| | | GGCCCAGATCGGCGACCAGTACGCCGACCTGTTCCTGGCCGCCAAGAACCTGAG |
| | | CGACGCCATCCTGCTGAGCGACATCCTGAGAGTGAACACCGAGATCACCAAGGCC |
| | | CCCCTGAGCGCCAGCATGATCAAGAGATACGACGAGCACCACCAGGACCTGACCC |
| | | TGCTGAAGGCCCTGGTGAGACAGCAGCTGCCCGAGAAGTACAAGGAGATCTTCTT |
| | | CGACCAGAGCAAGAACGGCTACGCCGGCTACATCGACGGCGGCGCCAGCCAGGA |
| | | GGAGTTCTACAAGTTCATCAAGCCCATCCTGGAGAAGATGGACGGCACCGAGGAG |
| | | CTGCTGGTGAAGCTGAACAGAGAGGACCTGCTGAGAAAGCAGAGAACCTTCGACA |
| | | ACGGCAGCATCCCCCACCAGATCCACCTGGGCGAGCTGCACGCCATCCTGAGAAG |
| | | ACAGGAGGACTTCTACCCCTTCCTGAAGGACAACAGAGAGAAGATCGAGAAGATC |
| | | CTGACCTTCAGAATCCCCTACTACGTGGGCCCCCTGGCCAGAGGCAACAGCAGAT |
| | | TCGCCTGGATGACCAGAAAGAGCGAGGAGACCATCACCCCCTGGAACTTCGAGGA |
| | | GGTGGTGGACAAGGGCGCCAGCGCCCAGAGCTTCATCGAGAGAATGACCAACTTC |
| | | GACAAGAACCTGCCCAACGAGAAGGTGCTGCCCAAGCACAGCCTGCTGTACGAGT |
| | | ACTTCACCGTGTACAACGAGCTGACCAAGGTGAAGTACGTGACCGAGGGCATGAG |
| | | AAAGCCCGCCTTCCTGAGCGGCGAGCAGAAGAAGGCCATCGTGGACCTGCTGTTC |
| | | AAGACCAACAGAAAGGTGACCGTGAAGCAGCTGAAGGAGGACTACTTCAAGAAGA |
| | | TCGAGTGCTTCGACAGCGTGGAGATCAGCGGCGTGGAGGACAGATTCAACGCCAG |
| | | CCTGGGCACCTACCACGACCTGCTGAAGATCATCAAGGACAAGGACTTCCTGGAC |
| | | AACGAGGAGAACGAGGACATCCTGGAGGACATCGTGCTGACCCTGACCCTGTTCG |
| | | AGGACAGAGAGATGATCGAGGAGAGACTGAAGACCTACGCCCACCTGTTCGACGA |
| | | CAAGGTGATGAAGCAGCTGAAGAGAAGAAGATACACCGGCTGGGGCAGACTGAGC |
| | | AGAAAGCTGATCAACGGCATCAGAGACAAGCAGAGCGGCAAGACCATCCTGGACT |
| | | TCCTGAAGAGTGACGGCTTCGCCAACAGAAACTTCATGCAGCTGATCCACGACGAC |
| | | AGCCTGACCTTCAAGGAGGACATCCAGAAGGCCCAGGTGAGCGGCCAGGGCGAC |
| | | AGCCTGCACGAGCACATCGCCAACCTGGCCGGCAGCCCCGCCATCAAGAAGGGC |
| | | ATCCTGCAGACCGTGAAGGTGGTGGACGAGCTGGTGAAGGTGATGGGCAGACACA |
| | | AGCCCGAGAACATCGTGATCGAGATGGCCAGAGAGAACCAGACCACCCAGAAGGG |
| | | CCAGAAGAACAGCAGAGAGAGAATGAAGAGAATCGAGGAGGGCATCAAGGAGCTG |
| | | GGCAGCCAGATCCTGAAGGAGCACCCCGTGGAGAACACCCAGCTGCAGAACGAG |
| | | AAGCTGTACCTGTACTACCTGCAGAACGGCAGAGACATGTACGTGGACCAGGAGC |
| | | TGGACATCAACAGACTGAGCGACTACGACGTGGACGCCATCGTGCCCCAGAGCTT |
| | | CCTGAAGGACGACAGCATCGACAACAAGGTGCTGACCAGAAGCGACAAGAACAGA |
| | | GGCAAGAGCGACAACGTGCCCAGCGAGGAGGTGGTGAAGAAGATGAAGAACTACT |
| | | GGAGACAGCTGCTGAACGCCAAGCTGATCACCCAGAGAAAGTTCGACAACCTGAC |
| | | CAAGGCCGAGAGAGGCGGCCTGAGCGAGCTGGACAAGGCCGGCTTCATCAAGAG |
| | | ACAGCTGGTGGAGACCAGACAGATCACCAAGCACGTGGCCCAGATCCTGGACAGC |
| | | AGAATGAACACCAAGTACGACGAGAACGACAAGCTGATCAGAGAGGTGAAGGTGA |
| | | TCACCCTGAAGAGTAAGCTGGTGAGCGACTTCAGAAAGGACTTCCAGTTCTACAAG |
| | | GTGAGAGAGATCAACAACTACCACCACGCCCACGACGCCTACCTGAACGCCGTGG |
| | | TGGGCACCGCCCTGATCAAGAAGTACCCCAAGCTGGAGAGCGAGTTCGTGTACGG |
| | | CGACTACAAGGTGTACGACGTGAGAAAGATGATCGCCAAGAGCGAGCAGGAGATC |
| | | GGCAAGGCCACCGCCAAGTACTTCTTCTACAGCAACATCATGAACTTCTTCAAGAC |
| | | CGAGATCACCCTGGCCAACGGCGAGATCAGAAAGAGACCCCTGATCGAGACCAAC |
| | | GGCGAGACCGGCGAGATCGTGTGGGACAAGGGCAGAGACTTCGCCACCGTGAGA |
| | | AAGGTGCTGAGCATGCCCCAGGTGAACATCGTGAAGAAGACCGAGGTGCAGACCG |
| | | GCGGCTTCAGCAAGGAGAGCATCCTGCCCAAGAGAAACAGCGACAAGCTGATCGC |
| | | CAGAAAGAAGGACTGGGACCCCAAGAAGTACGGCGGCTTCGACAGCCCCACCGT |
| | | GGCCTACAGCGTGCTGGTGGTGGCCAAGGTGGAGAAGGGCAAGAGCAAGAAGCT |
| | | GAAGAGTGTGAAGGAGCTGCTGGGCATCACCATCATGGAGAGAAGCAGCTTCGAG |
| | | AAGAACCCCATCGACTTCCTGGAGGCCAAGGGCTACAAGGAGGTGAAGAAGGACC |
| | | TGATCATCAAGCTGCCCAAGTACAGCCTGTTCGAGCTGGAGAACGGCAGAAAGAG |
| | | AATGCTGGCCAGCGCCGGCGAGCTGCAGAAGGGCAACGAGCTGGCCCTGCCCAG |
| | | CAAGTACGTGAACTTCCTGTACCTGGCCAGCCACTACGAGAAGCTGAAGGGCAGC |
| | | CCCGAGGACAACGAGCAGAAGCAGCTGTTCGTGGAGCAGCACAAGCACTACCTGG |
| | | ACGAGATCATCGAGCAGATCAGCGAGTTCAGCAAGAGAGTGATCCTGGCCGACGC |
| | | CAACCTGGACAAGGTGCTGAGCGCCTACAACAAGCACAGAGACAAGCCCATCAGA |
| | | GAGCAGGCCGAGAACATCATCCACCTGTTCACCCTGACCAACCTGGGCGCCCCCG |
| | | CCGCCTTCAAGTACTTCGACACCACCATCGACAGAAAGAGATACACCAGCACCAAG |
| | | GAGGTGCTGGACGCCACCCTGATCCACCAGAGCATCACCGGCCTGTACGAGACCA |
| | | GAATCGACCTGAGCCAGCTGGGGGGCGACAGCGGCGGCAGCAGCGGCGGCAGC |
| | | AGCGGCAGCGAGACCCCCGGCACCAGCGAGAGCGCCACCCCCGAGAGCAGCGG |
| | | CGGCAGCAGCGGCGGCAGCAGCACCCTGAACATCGAGGACGAGTACAGACTGCA |
| | | CGAGACCAGCAAGGAGCCCGACGTGAGCCTGGGCAGCACCTGGCTGAGCGACTT |
| | | CCCCCAGGCCTGGGCCGAGACCGGCGGCATGGGCCTGGCCGTGAGACAGGCCC |
| | | CCCTGATCATCCCCCTGAAGGCCACCAGCACCCCCGTGAGCATCAAGCAGTACCC |
| | | CATGAGCCAGGAGGCCAGACTGGGCATCAAGCCCCACATCCAGAGACTGCTGGAC |
| | | CAGGGCATCCTGGTGCCCTGCCAGAGCCCCTGGAACACCCCCCTGCTGCCCGTG |
| | | AAGAAGCCCGGCACCAACGACTACAGACCCGTGCAGGACCTGAGAGAGGTGAACA |
| | | AGAGAGTGGAGGACATCCACCCCACCGTGCCCAACCCCTACAACCTGCTGAGCGG |
| | | CCTGCCCCCCAGCCACCAGTGGTACACCGTGCTGGACCTGAAGGACGCCTTCTTC |
| | | TGCCTGAGACTGCACCCCACCAGCCAGCCCCTGTTCGCCTTCGAGTGGAGAGACC |
| | | CCGAGATGGGCATCAGCGGCCAGCTGACCTGGACCAGACTGCCCCAGGGCTTCA |
| | | AGAACAGCCCCACCCTGTTCAACGAGGCCCTGCACAGAGACCTGGCCGACTTCAG |
| | | AATCCAGCACCCCGACCTGATCCTGCTGCAGTACGTGGACGACCTGCTGCTGGCC |
| | | GCCACCAGCGAGCTGGACTGCCAGCAGGGCACCAGAGCCCTGCTGCAGACCCTG |
| | | GGCAACCTGGGCTACAGAGCCAGCGCCAAGAAGGCCCAGATCTGCCAGAAGCAG |
| | | GTGAAGTACCTGGGCTACCTGCTGAAGGAGGGCCAGAGATGGCTGACCGAGGCC |
| | | AGAAAGGAGACCGTGATGGGCCAGCCCACCCCCAAGACCCCCAGACAGCTGAGA |
| | | GAGTTCCTGGGCAAGGCCGGCTTCTGCAGACTGTTCATCCCCGGCTTCGCCGAGA |
| | | TGGCCGCCCCCCTGTACCCCCTGACCAAGCCCGGCACCCTGTTCAACTGGGGCCC |
| | | CGACCAGCAGAAGGCCTACCAGGAGATCAAGCAGGCCCTGCTGACCGCCCCCGC |
| | | CCTGGGCCTGCCCGACCTGACCAAGCCCTTCGAGCTGTTCGTGGACGAGAAGCAG |
| | | GGCTACGCCAAGGGCGTGCTGACCCAGAAGCTGGGCCCCTGGAGAAGACCCGTG |
| | | GCCTACCTGAGCAAGAAGCTGGACCCCGTGGCCGCCGGCTGGCCCCCCTGCCTG |
| | | AGAATGGTGGCCGCCATCGCCGTGCTGACCAAGGACGCCGGCAAGCTGACCATG |
| | | GGCCAGCCCCTGGTGATCCTGGCCCCCCACGCCGTGGAGGCCCTGGTGAAGCAG |
| | | CCCCCCGACAGATGGCTGAGCAACGCCAGAATGACCCACTACCAGGCCCTGCTGC |
| | | TGGACACCGACAGAGTGCAGTTCGGCCCCGTGGTGGCCCTGAACCCCGCCACCC |
| | | TGCTGCCCCTGCCCGAGGAGGGCCTGCAGCACAACTGCCTGGACATCCTGGCCG |
| | | AGGCCCACGGCACCAGACCCGACCTGACCGACCAGCCCCTGCCCGACGCCGACC |
| | | ACACCTGGTACACCGACGGCAGCAGCCTGCTGCAGGAGGGCCAGAGAAAGGCCG |
| | | GCGCCGCCGTGACCACCGAGACCGAGGTGATCTGGGCCAAGGCCCTGCCCGCCG |
| | | GCACCAGCGCCCAGAGAGCCGAGCTGATCGCCCTGACCCAGGCCCTGAAGATGG |
| | | CCGAGGGCAAGAAGCTGAACGTGTACACCGACAGCAGATACGCCTTCGCCACCGC |
| | | CCACATCCACGGCGAGATCTACAGAAGAAGAGGCTGGCTGACCAGCGAGGGCAA |
| | | GGAGATCAAGAACAAGGACGAGATCCTGGCCCTGCTGAAGGCCCTGTTCCTGCCC |
| | | AAGAGACTGAGCATCATCCACTGCCCCGGCCACCAGAAGGGCCACAGCGCCGAG |
| | | GCCAGAGGCAACAGAATGGCCGACCAGGCCGCCAGAAAGGCCGCCATCACCGAG |
| | | ACCCCCGACACCAGCACCCTGCTGATCGAGAACAGCAGCCCCAGCGGCGGCAGC |
| | | AAGAGAACCGCCGACGGCAGCGAGTTCGAGCCCAAGAAGAAGAGAAAGGTGGGC |
| | | GGCAGCGTGAGCGGCTGGAGACTGTTCAAGAAGATCAGCTGATGAACCAGCCTCA |
| | | AGAACACCCGAATGGAGTCTCTAAGCTACATAATACCAACTTACACTTTACAAAATG |
| | | TTGTCCCCCAAAAATGTAGCCATTCGTATCTGCTCCTAATAAAAAGAAAGTTTCTTCA |
| | | CATTCTAAAAAAAAAAAAAAAAAAAAAAAAAAAAAAAAAAAAAAAAAAAAAAAAAAA |
| | | AAAAAAAAAAAAAAAAAAAAAAAAAAAA |
| 590 | mRNA- | AGGAAGCTCAGAATAAACGCTCAACTTTGGCCGGATCTGCCACCATGCCCAAGAAG |
| | PL1305 | AAGAGAAAGGTGGGCAGCGGCAGAGCCCTGGTGGTGATCAGACTGAGCAGAGTG |
| | (BxB1) | ACCGACGCCACCACCAGCCCCGAGAGACAGCTGGAGAGCTGCCAGCAGCTGTGC |
| | | GCCCAGAGAGGCTGGGACGTGGTGGGCGTGGCCGAGGACCTGGACGTGAGCGG |
| | | CGCCGTGGACCCCTTCGACAGAAAGAGAAGACCCAACCTGGCCAGATGGCTGGCC |
| | | TTCGAGGAGCAGCCCTTCGACGTGATCGTGGCCTACAGAGTGGACAGACTGACCA |
| | | GAAGCATCAGACACCTGCAGCAGCTGGTGCACTGGGCCGAGGACCACAAGAAGCT |
| | | GGTGGTGAGCGCCACCGAGGCCCACTTCGACACCACCACCCCCTTCGCCGCCGT |
| | | GGTGATCGCCCTGATGGGCACCGTGGCCCAGATGGAGCTGGAGGCCATCAAGGA |
| | | GAGAAACAGAAGCGCCGCCCACTTCAACATCAGAGCCGGCAAGTACAGAGGCAGC |
| | | CTGCCCCCCTGGGGCTACCTGCCCACCAGAGTGGACGGCGAGTGGAGACTGGTG |
| | | CCCGACCCCGTGCAGAGAGAGAGAATCCTGGAGGTGTACCACAGAGTGGTGGACA |
| | | ACCACGAGCCCCTGCACCTGGTGGCCCACGACCTGAACAGAAGAGGCGTGCTGA |
| | | GCCCCAAGGACTACTTCGCCCAGCTGCAGGGCAGAGAGCCCCAGGGCAGAGAGT |
| | | GGAGCGCCACCGCCCTGAAGAGAAGCATGATCAGCGAGGCCATGCTGGGCTACG |
| | | CCACCCTGAACGGCAAGACCGTGAGAGACGACGACGGCGCCCCCCTGGTGAGAG |
| | | CCGAGCCCATCCTGACCAGAGAGCAGCTGGAGGCCCTGAGAGCCGAGCTGGTGA |
| | | AGACCAGCAGAGCCAAGCCCGCCGTGAGCACCCCCAGCCTGCTGCTGAGAGTGC |
| | | TGTTCTGCGCCGTGTGCGGCGAGCCCGCCTACAAGTTCGCCGGCGGCGGCAGAA |
| | | AGCACCCCAGATACAGATGCAGAAGCATGGGCTTCCCCAAGCACTGCGGCAACGG |
| | | CACCGTGGCCATGGCCGAGTGGGACGCCTTCTGCGAGGAGCAGGTGCTGGACCT |
| | | GCTGGGCGACGCCGAGAGACTGGAGAAGGTGTGGGTGGCCGGCAGCGACAGCG |
| | | CCGTGGAGCTGGCCGAGGTGAACGCCGAGCTGGTGGACCTGACCAGCCTGATCG |
| | | GCAGCCCCGCCTACAGAGCCGGCAGCCCCCAGAGAGAGGCCCTGGACGCCAGAA |
| | | TCGCCGCCCTGGCCGCCAGACAGGAGGAGCTGGAGGGCCTGGAGGCCAGACCCA |
| | | GCGGCTGGGAGTGGAGAGAGACCGGCCAGAGATTCGGCGACTGGTGGAGAGAGC |
| | | AGGACACCGCCGCCAAGAACACCTGGCTGAGAAGCATGAACGTGAGACTGACCTT |
| | | CGACGTGAGAGGCGGCCTGACCAGAACCATCGACTTCGGCGACCTGCAGGAGTA |
| | | CGAGCAGCACCTGAGACTGGGCAGCGTGGTGGAGAGACTGCACACCGGCATGAG |
| | | CTGATGAACCAGCCTCAAGAACACCCGAATGGAGTCTCTAAGCTACATAATACCAA |
| | | CTTACACTTTACAAAATGTTGTCCCCCAAAATGTAGCCATTCGTATCTGCTCCTAATA |
| | | AAAAGAAAGTTTCTTCACATTCTAAAAAAAAAAAAAAAAAAAAAAAAAAAAAAAAAAA |
| | | AAAAAAAAAAAAAAAAAAAAAAAAAAAAAAAAAAAAAAAAAAAAA |
| 591 | mRNA- | AGGAAGCTCAGAATAAACGCTCAACTTTGGCCGGATCTGCCACCATGCCCAAGAAG |
| | PL1325 | AAGAGAAAGGTGTACCCCTACGACGTGCCCGACTACGCCAAGGACAAGAAATCCG |
| | (Bxb1 | ATGGCAAGGACAGCCAGAAAAAAGGCAGCAGAGCCCTGGTGGTGATCAGACTGAG |
| | with | CAGAGTGACCGACGCCACCACCAGCCCCGAGAGACAGCTGGAGAGCTGCCAGCA |
| | stabili- | GCTGTGCGCCCAGAGAGGCTGGGACGTGGTGGGCGTGGCCGAGGACCTGGACGT |
| | zation | GAGCGGCGCCGTGGACCCCTTCGACAGAAAGAGAAGACCCAACCTGGCCAGATG |
| | domain) | GCTGGCCTTCGAGGAGCAGCCCTTCGACGTGATCGTGGCCTACAGAGTGGACAGA |
| | | CTGACCAGAAGCATCAGACACCTGCAGCAGCTGGTGCACTGGGCCGAGGACCACA |
| | | AGAAGCTGGTGGTGAGCGCCACCGAGGCCCACTTCGACACCACCACCCCCTTCGC |
| | | CGCCGTGGTGATCGCCCTGATGGGCACCGTGGCCCAGATGGAGCTGGAGGCCAT |
| | | CAAGGAGAGAAACAGAAGCGCCGCCCACTTCAACATCAGAGCCGGCAAGTACAGA |
| | | GGCAGCCTGCCCCCCTGGGGCTACCTGCCCACCAGAGTGGACGGCGAGTGGAGA |
| | | CTGGTGCCCGACCCCGTGCAGAGAGAGAGAATCCTGGAGGTGTACCACAGAGTG |
| | | GTGGACAACCACGAGCCCCTGCACCTGGTGGCCCACGACCTGAACAGAAGAGGC |
| | | GTGCTGAGCCCCAAGGACTACTTCGCCCAGCTGCAGGGCAGAGAGCCCCAGGGC |
| | | AGAGAGTGGAGCGCCACCGCCCTGAAGAGAAGCATGATCAGCGAGGCCATGCTG |
| | | GGCTACGCCACCCTGAACGGCAAGACCGTGAGAGACGACGACGGCGCCCCCCTG |
| | | GTGAGAGCCGAGCCCATCCTGACCAGAGAGCAGCTGGAGGCCCTGAGAGCCGAG |
| | | CTGGTGAAGACCAGCAGAGCCAAGCCCGCCGTGAGCACCCCCAGCCTGCTGCTG |
| | | AGAGTGCTGTTCTGCGCCGTGTGCGGCGAGCCCGCCTACAAGTTCGCCGGCGGC |
| | | GGCAGAAAGCACCCCAGATACAGATGCAGAAGCATGGGCTTCCCCAAGCACTGCG |
| | | GCAACGGCACCGTGGCCATGGCCGAGTGGGACGCCTTCTGCGAGGAGCAGGTGC |
| | | TGGACCTGCTGGGCGACGCCGAGAGACTGGAGAAGGTGTGGGTGGCCGGCAGCG |
| | | ACAGCGCCGTGGAGCTGGCCGAGGTGAACGCCGAGCTGGTGGACCTGACCAGCC |
| | | TGATCGGCAGCCCCGCCTACAGAGCCGGCAGCCCCCAGAGAGAGGCCCTGGACG |
| | | CCAGAATCGCCGCCCTGGCCGCCAGACAGGAGGAGCTGGAGGGCCTGGAGGCCA |
| | | GACCCAGCGGCTGGGAGTGGAGAGAGACCGGCCAGAGATTCGGCGACTGGTGGA |
| | | GAGAGCAGGACACCGCCGCCAAGAACACCTGGCTGAGAAGCATGAACGTGAGACT |
| | | GACCTTCGACGTGAGAGGCGGCCTGACCAGAACCATCGACTTCGGCGACCTGCAG |
| | | GAGTACGAGCAGCACCTGAGACTGGGCAGCGTGGTGGAGAGACTGCACACCGGC |
| | | ATGAGCTGATGAACCAGCCTCAAGAACACCCGAATGGAGTCTCTAAGCTACATAAT |
| | | ACCAACTTACACTTTACAAAATGTTGTCCCCCAAAATGTAGCCATTCGTATCTGCTC |
| | | CTAATAAAAAGAAAGTTTCTTCACATTCTAAAAAAAAAAAAAAAAAAAAAAAAAAAAA |
| | | AAAAAAAAAAAAAAAAAAAAAAAAAAAAAAAAAAAAAAAAAAAAAAAAAAAt |
| 592 | AAVG0 | cgtatcacgaggccctttgtcacagcttgtctgtaagcggatgccgggagcagacaagcccgtcagggcgcgtcagcgg |
| | 48 | gtgttggcgggtgtcggggctggcttaactatgcggcatcagagcagattgtactgagagtgcaccatatgcggtgtgaaat |
| | | accgcacagatgcgtaaggagaaaataccgcatcaggcgccattcgccattcaggctgcgcaactgttgggaagggcg |
| | | atcggtgcgggcctcttcgctattacgccagctggcgaaagggggatgtgctgcaaggcgattaagttgggtaacgccag |
| | | ggttttcccagtcacgacgttgtaaaacgacggccagtgaattcGAGCTCtcgctattacTTGGCCACTCCCTC |
| | | TCTGCGCGCTCGCTCGCTCACTGAGGCCGGGCGACCAAAGGTCGCCCGACGCCC |
| | | GGGCTTTGCCCGGGCGGCCTCAGTGAGCGAGCGAGCGCGCAGAGAGGGAGTGG |
| | | CCAACTCCATCACTAGGGGTTCCTCACTGCCCGCagatctACTAGTCGTGTGGGGAC |
| | | CAGGTTTTGCCTTTAGTTTTGCACACACTGTAGTTCATCaacaaaaaaaTATACTTGCTA |
| | | GGatgatcctgacgacggagaccgccgtcgtgcaccgactcggtgccactttttcaagttgataacggactagccttatttt |
| | | aacttgctatttctagctctaaaacAGCCCTAGCAAGTATATATACggtgtttcgtcctttccacaagatatataa |
| | | agccaagaaatcgaaatactttcaagttacggtaagcatatgatagtccattttaaaacataattttaaaactgcaaactacccaa |
| | | gaaattattactttctacgtcacgtattttgtactaatatctttgtgtttacagtcaaattaattctaattatctctctaacagcctt |
| | | gtatcgtatatgcaaatatgaaggaatcatgggaaataggccctcCCTGTCTCAAAAAAAAGAAATTGGC |
| | | AGAATTAAGTAAGTTGATGTTTGCCaaaaaaaTATGCCCCGAGAAggcttgtcgacgacggcg |
| | | gtctccgtcgtgcaccgactcggtgccactttttcaagttgataacggactagccttattttaacttgctatttctagctctaaaac |
| | | CACTTCTCGGGGCATACAAGCggtgtttcgtcctttccacaagatatataaagccaagaaatcgaaatactttc |
| | | aagttacggtaagcatatgatagtccattttaaaacataattttaaaactgcaaactacccaagaaattattactttctacgtca |
| | | cgtattttgtactaatatctttgtgtttacagtcaaattaattctaattatctctctaacagccttgtatcgtatatgcaaatatgaa |
| | | ggaatcatgggaaataggccctcTTTATGGAGATGCTCATGGCCTCATTGAAGCCCCACTACAG |
| | | CTCTGGTAGCGGTAACCATGCGTATTTGACACACGAAGGAACTAGGGAAAAGGCAT |
| | | TAGGTGGTTTGTCTGGTCAACCACCGCGGTCTCAGTGGTGTACGGTACAAACCCAC |
| | | CACCATGGGCAACAGCTTCAGCACCAGCGCCTTCGGCCCTGTGGCCTTTTCTCTG |
| | | GGCCTCCTGCTCGTGCTGCCTGCCGCTTTTCCAGCTCCTGTGTTCACCCTGGAAGA |
| | | TTTCGTGGGAGATTGGCGGCAGACCGCCGGCTACAACCTGGACCAAGTGCTGGAA |
| | | CAGGGCGGAGTGTCCAGCCTGTTTCAGAACCTGGGCGTETCCGTGACCCCTATCCA |
| | | GCGGATCGTGCTGAGCGGCGAGAACGGCCTGAAAATCGACATCCATGTGATTATC |
| | | CCCTACGAGGGCCTGAGCGGAGATCAGATGGGCCAGATCGAGAAAATCTTCAAGG |
| | | TGGTGTACCCCGTCGACGACCACCACTTCAAGGTGATCCTGCACTACGGCACCCT |
| | | GGTGATCGACGGCGTTACCCCTAACATGATCGACTACTTCGGCAGACCCTATGAG |
| | | GGAATTGCCGTGTTCGACGGCAAGAAAATCACCGTGACCGGCACACTGTGGAACG |
| | | GCAACAAGATCATCGATGAGCGCCTGATCAACCCAGACGGCAGCCTGCTGTTCAG |
| | | AGTGACAATCAATGGCGTGACAGGCTGGAGACTTTGTGAAAGAATCCTGGCCtgaGT |
| | | TTGGACAAACCACAACTAGAATctgtgccttctagttgccagccatctgttgtttgcccctcccccgtgccttcctt |
| | | gaccctggaaggtgccactcccactgtcctttcctaataaaatgagaaaattgcatcgcattgtctgagtaggtgtcattctatt |
| | | ctggggggtggggtggggcaggacagcaagggggaggattgggaagacaatagcaggcatgctggggatgcggtgg |
| | | gctctatggGTctacaACTAGTagatctCACTGCCCGCccactccctctctgcgcgctcgctcgctcactgaggc |
| | | cgggcgaccaaaggtcgcccgacgcccgggctttgcccgggggcctcagtgagcgagcgagcgcgcagagaggga |
| | | tgcattaatgGGATCCtctagagtcgacctgcaggcatgcaagcttggcgtaatcatggtcatagctgtttcctgtgtgaa |
| | | attgttatccgctcacaattccacacaacatacgagccggaagcataaagtgtaaagcctggggtgcctaatgagtgagct |
| | | aactcacattaattgcgttgcgctcactgcccgctttccagtcgggaaacctgtcgtgccagctgcattaatgaatcggccaa |
| | | cgcgcggggagaggcggtttgcgtattgggcgctcttacgcttcctcgctcactgactcgctgcgctcggtcgttcggctgcg |
| | | gcgagcggtatcagctcactcaaaggcggtaatacggttatccacagaatcaggggataacgcaggaaagaacatgtg |
| | | agcaaaaggccagcaaaaggccaggaaccgtaaaaaggccgcgttgctggcgtttttccataggctccgcccccctgac |
| | | gagcatcacaaaaatcgacgctcaagtcagaggtggcgaaacccgacaggactataaagataccaggcgtttccccct |
| | | ggaagctccctcgtgcgctctcctgttccgaccctgccgcttaccggatacctgtccgcctttctcccttcgggaagcgtggcg |
| | | ctttctcatagctcacgctgtaggtatctcagttcggtgtaggtcgttcgctccaagctgggctgtgtgcacgaaccccccgttc |
| | | agcccgaccgctgcgccttatccggtaactatcgtcttgagtccaacccggtaagacacgacttatcgccactggcagcag |
| | | ccactggtaacaggattagcagagcgaggtatgtaggcggtgctacagagttcttgaagtggtggcctaactacggctaca |
| | | ctagaaggacagtatttggtatctgcgctctgctgaagccagttaccttcggaaaaagagttggtagctcttgatccggcaaa |
| | | caaaccaccgctggtagcggtggtttttttgtttgcaagcagcagattacgcgcagaaaaaaaggatctcaagaagatcctt |
| | | tgatcttttctacggggtctgacgctcagtggaacgaaaactcacgttaagggattttggtcatgagattatcaaaaaggatct |
| | | tcacctagatccttttaaattaaaaatgaagttttaaatcaatctaaagtatatatgagtaaacttggtctgacagttaccaatgc |
| | | ttaatcagtgaggcacctatctcagcgatctgtctatttcgttcatccatagttgcctgactccccgtcgtgtagataactacgat |
| | | acgggagggcttaccatctggccccagtgctgcaatgataccgcgagacccacgctcaccggctccagatttatcagcaa |
| | | taaaccagccagccggaagggccgagcgcagaagtggtcctgcaactttatccgcctccatccagtctattaattgttgccg |
| | | ggaagctagagtaagtagttcgccagttaatagtttgcgcaacgttgttgccattgctacaggcatcgtggtgtcacgctcgtc |
| | | gtttggtatggcttcattcagctccggttcccaacgatcaaggcgagttacatgatcccccatgttgtgcaaaaaagcggttag |
| | | ctccttcggtcctccgatcgttgtcagaagtaagttggccgcagtgttatcactcatggttatggcagcactgcataattctctta |
| | | ctgtcatgccatccgtaagatgcttttctgtgactggtgagtactcaaccaagtcattctgagaatagtgtatgcggcgaccga |
| | | gttgctcttgcccggcgtcaatacgggataataccgcgccacatagcagaactttaaaagtgctcatcattggaaaacgttct |
| | | tcggggcgaaaactctcaaggatcttaccgctgttgagatccagttcgatgtaacccactcgtgcacccaactgatcttcagc |
| | | atcttttactttcaccagcgtttctgggtgagcaaaaacaggaaggcaaaatgccgcaaaaaagggaataagggcgaca |
| | | cggaaatgttgaatactcatactcttcctttttcaatattattgaagcatttatcagggttattgtctcatgagcggatacatatttg |
| | | aatgtatttagaaaaataaacaaataggggttccgcgcacatttccccgaaaagtgccacctgacgtctaagaaaccattatt |
| | | atcatgacattaacctataaaaataggcgtatcacgaggccctttcgtc |

[0697] Genomic DNA was harvested 3 days after transduction. Data is shown in FIG. 24A-24C.

### 7.12. Example 12: Assessment of Integration Enzymes Encoded by Engineered mRNA

[0698] Engineered integrases described in FIG. 25 (see also Table 26) were evaluated for their ability to mediate programmable gene insertion (as indicated by “Occupancy %” (FIG. 26)).

[0699] For these experiments, the engineered integrases were introduced into a primary human hepatocyte (PHH) at a high dose (1.3 pmol) and a low dose (0.2 pmol) along with a gene editor polypeptide (i.e., mRNA encoding a gene editor polypeptide (i.e., a Cas9 nickase fused to a reverse transcriptase)); an AAV expressing an atgRNA (the atgRNA comprising a spacer sequence with sequence complementarity to a sequence in the human factor IX locus, a scaffold, an RT template comprising an integration recognition site, and a primer binding site (see Table 19 above for atgRNA sequences); and a donor polynucleotide template comprising a cognate integration recognition site. Similar to Example 11, the AAV used to deliver the atgRNA also included the donor polynucleotide template sequence. The AAV sequence is AAVG048 (SEQ ID NO: 592; see Table 20 above). Genomic DNA was harvested 3 days after transduction. Data is shown in FIG. 26.

### 7.13. Example 13: Assessment of Tag/Domain Placement in Engineered Integration Enzymes on PGI

[0700] Engineered integrases described in FIG. 23 (see also Table 26) comprising were evaluated for their ability to mediate programmable gene insertion (as indicated by “Occupancy %” ˜(FIGS. 27A-27D)). In particular, additional experiments were performed to assess engineered BxB1 integrases having a c-terminal tag. In particular, these engineered integrases were assessed for their ability to mediate programmable gene insertion (e.g., as indicated by 00 Beacon Occupancy).

[0701] For these experiments, the engineered integrases were introduced into a primary human hepatocyte (PHH) at amounts of 1000 ng, 500 ng, and 250 ng, along with a gene editor polypeptide (i.e., mRNA encoding a gene editor polypeptide (i.e., a Cas9 nickase fused to a reverse transcriptase)); an atgRNA comprising a spacer sequence with sequence complementarity to a sequence in the human factor IX locus, a scaffold, an RT template comprising an integration recognition site, and a primer binding site (see Table 19 above for atgRNA sequences); and a donor polynucleotide template comprising a cognate integration recognition site at 40 fmol, 20 fmol, and 10 fmol. The donor polynucleotide template was introduced into the cells as an AAV vector (PL 753 (SEQ ID NO: 593)). Genomic DNA was harvested 3 days after transduction.

TABLE 21

| SEQ | | |
|---|---|---|
| ID | | |
| NO: | Name | Sequence |
| 593 | PL753 | ccccaactggggtaaccTTTGGGCTCCCCGGGCGCGACTATAAGCTGCGAGCAACTTCAC |
| | | TTGGGTATGCCGGCGGTAGCGCTTACCGTTCGTATAATGTATGCTATACGAAGTTATCCG |
| | | AAGCCGCTAGCGGTGGTTTGTCTGGTCAACCACCGCGGTCTCAGTGGTGTACGGTAC |
| | | AAACCCAGCTACCGGTCGTAGGTCAGTGAAGAGAAGAACAAAAAGCAGCATATTACAG |
| | | TTAGTTGTCTTCATCAATCTTGAAATATGTTGTGTCCTTTTTCTCTCCCTGTTTCCACAG |
| | | TTATGGGCAACAGCTTCAGCACCAGCGCCTTCGGCCCTGTGGCCTTTTCTCTGGGCCT |
| | | CCTGCTCGTGCTGCCTGCCGCTTTTCCAGCTCCTGTGTTCACCCTGGAAGATTTCGTG |
| | | GGAGATTGGCGGCAGACCGCCGGCTACAACCTGGACCAAGTGCTGGAACAGGGCGG |
| | | AGTGTCCAGCCTGTTTCAGAACCTGGGCGTCTCCGTGACCCCTATCCAGCGGATCGT |
| | | GCTGAGCGGCGAGAACGGCCTGAAAATCGACATCCATGTGATTATCCCCTACGAGGG |
| | | CCTGAGCGGAGATCAGATGGGCCAGATCGAGAAAATCTTCAAGGTGGTGTACCCCGT |
| | | CGACGACCACCACTTCAAGGTGATCCTGCACTACGGCACCCTGGTGATCGACGGCGT |
| | | TACCCCTAACATGATCGACTACTTCGGCAGACCCTATGAGGGAATTGCCGTGTTCGAC |
| | | GGCAAGAAAATCACCGTGACCGGCACACTGTGGAACGGCAACAAGATCATCGATGAG |
| | | CGCCTGATCAACCCAGACGGCAGCCTGCTGTTCAGAGTGACAATCAATGGCGTGACA |
| | | GGCTGGAGACTTTGTGAAAGAATCCTGGCCGGTTCTGGCGGCGCCACCAACTTCAGC |
| | | CTGCTGAAGCAGGCCGGCGACGTGGAAGAGAATCCCGGACCTGAGGGCAGAGGATC |
| | | TCTGCTGACATGCGGCGATGTGGAAGAGAATCCTGGACCTGCTATGAAAATCGAGTGC |
| | | AGAATTACAGGCACACTGAACGGAGTTGAATTCGAGCTGGTCGGCGGAGGCGAGGGC |
| | | ACACCTGAGCAGGGCAGAATGACCAACAAGATGAAAAGCACCAAGGGCGCCCTGACC |
| | | TTTTCTCCTTACCTGCTGAGCCACGTGATGGGCTATGGCTTCTACCACTTCGGCACCTA |
| | | CCCCAGCGGCTATGAAAACCCCTTCCTGCATGCTATCAACAACGGAGGCTACACCAAT |
| | | ACCAGAATCGAGAAGTACGAGGACGGCGGCGTGCTGCACGTGTCCTTCAGCTACAGA |
| | | TACGAGGCCGGCAGAGTGATCGGCGACTTCAAGGTGGTGGGCACAGGATTTCCAGAA |
| | | GATAGCGTGATCTTCACCGACAAGATCATCCGGAGCAACGCCACCGTGGAACACCTG |
| | | CACCCCATGGGCGATAATGTGCTGGTGGGCTCCTTTGCTAGAACATTCTCCCTGCGGG |
| | | ACGGCGGATACTACAGCTTCGTGGTCGACAGCCACATGCACTTCAAGTCTGCCATCCA |
| | | CCCTTCTATCCTGCAGAACGGCGGACCTATGTTCGCCTTCCGGCGGGTGGAGGAACT |
| | | CCACAGCAACACCGAGCTGGGCATCGTGGAATACCAGCACGCCTTTAAGACCCCTATC |
| | | GCCTTCGCCAGAAGCAGAGCCAGGTGAGAGCTCGATGAGTTTGGACAAACCACAACT |
| | | AGAATGCAGTGAAAAAAATGCTTTATTTGTGAAATTTGTGATGCTATTGCTTTATTTGTg |
| | | ggcccg |

[0702] Data is shown in FIGS. 27A-27D. Overall, this data showed that a c-terminal tag reduced integration efficiency of BxB1.

### 7.14. Example 14: Assessment of Integration Enzymes Engineered to Include Stabilization Domains

[0703] The integration enzymes engineered to include stabilization domains were also assessed for their dose dependent impact on PGI. Additional engineered integration enzymes are described in FIG. 28 (see also Table 26).

[0704] For these experiments, the engineered integrases were introduced into a primary human hepatocyte (PHH) at a 250 ng along with a gene editor polypeptide (i.e., mRNA encoding a gene editor polypeptide (i.e., a Cas9 nickase fused to a reverse transcriptase)); an atgRNA comprising a spacer sequence with sequence complementarity to a sequence in the human factor IX locus, a scaffold, an RT template comprising an integration recognition site, and a primer binding site (see Table 19 above in Example 11 for atgRNA sequences); and a donor polynucleotide template comprising a cognate integration recognition site. Genomic DNA was harvested 3 days after transduction. Data for programmable gene insertion (PGI) is shown in FIGS. 29A-29B. This data showed that an engineered BxB1 comprising a stabilon domain resulted in increased programmable gene insertion (PGI) compared to the other BxB1 polypeptides, including other engineered BxB1 polypeptides.

[0705] Additional experiments were performed to assess the engineered integrases introduced into a primary human hepatocyte (PHH) at 500 ng, 62.5 ng, and 7.81 ng along with a gene editor polypeptide (i.e., mRNA encoding a gene editor polypeptide (i.e., a Cas9 nickase fused to a reverse transcriptase)); an atgRNA comprising a spacer sequence with sequence complementarity to a sequence in the human factor IX locus, a scaffold, an RT template comprising an integration recognition site, and a primer binding site (see Table 19 above for atgRNA sequences); and a donor polynucleotide template comprising a cognate integration recognition site. Genomic DNA was harvested 3 days after transduction. Data for programmable gene insertion (PGI) is shown in FIGS. 29C-29D.

[0706] Overall, similar to the data in FIG. 29A-29B, the data in FIG. 29C-29D showed that an engineered BxB1 comprising a stabilon domain has increased programmable gene insertion (PGI) compared to the other BxB1 polypeptides, including other engineered BxB1 polypeptides.

### 7.15. Example 15: Assessment of Engineered Integration Enzymes in Pluripotent Stem Cells

[0707] Engineered integration enzymes were assessed for their ability to mediate PGI in pluripotent stem cells. A non-limiting exemplary workflow is as described in FIG. 30A. Engineered integration enzymes that were used in these experiments are as described in FIG. 30B (see also Table 26).

[0708] For these experiments, the engineered integrases were introduced into a pluripotent stem cell clone 52 or clone 17 along with a BxB1 mRNA; and a donor polynucleotide template comprising a cognate integration recognition site (PL1113 (SEQ ID NO: 594; see Table 22 below)).

### Electroporation Conditions—

| | |
|---|---|
| Media | E8 media |
| Coating | Vitronectin |
| Cells/rxn | 1e5 cells |
| EP Program | 1200 V, 30 ms, 1 pulse |
| Recovery | E8 + CloneR2 24 h post-EP |
| Bxb1 mRNA | 2 ug/rxn |
| PL1113 [GT] | 1 ug/rxn |

TABLE 22

| SEQ | | |
|---|---|---|
| ID | | |
| NO: | Name | Sequence |
| 594 | PL1113 | tggtttttttgtttgcaagcagcagattacgcgcagaaaaaaaggatctcaagaagatcctttgatcttttctacggggtctgacg |
| | (pUC57- | ctcagtggaacgaaaactcacgttaagggattttggtcatgagattatcaaaaaggatcttcacctagatccttttaaattaaaa |
| | KAN- | atgaagttttaaatcaagcccaatctgaataatgttacaaccaattaaccaattctgattagaaaaactcatcgagcatcaaat |
| | EF1a- | gaaactgcaatttattcatatcaggattatcaataccatatttttgaaaaagccgtttctgtaatgaaggagaaaactcaccgag |
| | GFP- | tcaaaaataaggttatcaagtgagaaatcaccatgagtgacgactgaatccggtgagaatggcaaaagtttatgcatttctttc |
| | P2A- | ccagcgcatcaacaatattttcacctgaatcaggatattcttctaatacctggaatgctgtttttccggggatcgcagtggtgagt |
| | Puro) | cagacttgttcaacaggccagccattacgctcgtcatcaaaatcactcgcatcaaccaaaccgttattcattcgtgattgcgcct |
| | | gagcgagacgaaatacgcgatcgctgttaaaaggacaattacaaacaggaatcgaatgcaaccggcgcaggaacactg |
| | | gcagttccataggatggcaagatcctggtatcggtctgcgattccgactcgtccaacatcaatacaacctattaatttcccctcg |
| | | aaccatgcatcatcaggagtacggataaaatgcttgatggtcggaagaggcataaattccgtcagccagtttagtctgaccat |
| | | ctcatctgtaacatcattggcaacgctacctttgccatgtttcagaaacaactctggcgcatcgggcttcccatacaagcgata |
| | | gattgtcgcacctgattgcccgacattatcgcgagcccatttatacccatataaatcagcatccatgttggaatttaatcgcggc |
| | | ctcgacgtttcccgttgaatatggctcataacaccccttgtattactgtttatgtaagcagacagttttattgttcatgatgatatattttt |
| | | atcttgtgcaatgtaacatcagagattttgagacacgggccagagctgcatcgcgcgtttcggtgatgacggtgaaaacctct |
| | | gacacatgcagctcccggagacggtcacagcttgtctgtaagcggatgccgggagcagacaagcccgtcagggcgcgtc |
| | | agcgggtgttggcgggtgtcggggctggcttaactatgcggcatcagagcagattgtactgagagtgcaccatatgcggtgt |
| | | gaaataccgcacagatgcgtaaggagaaaataccgcatcaggcgccattcgccattcaggctgcgcaactgttgggaag |
| | | ggcgatcggtgcgggcctcttcgctattacgccagctggcgaaagggggatgtgctgcaaggcgattaagttgggtaacgc |
| | | cagggttttcccagtcacacgttgtaaaacgacggccagaGTGGTTTGTCTGGTCAACCACCGCGGTCT |
| | | CAGTGGTGTACGGTACAAACCCAgaattcgagctcggctccggtgcccgtcagtgggcagagcgcacatc |
| | | gcccacagtccccgagaagttggggggaggggtcggcaattgaaccggtgcctagagaaggtggcgcggggtaaactg |
| | | ggaaagtgatgtcgtgtactggctccgcctttttcccgagggtgggggagaaccgtatataagtgcagtagtcgccgtgaacg |
| | | ttctttttcgcaacgggtttgccgccagaacacaggtaagtgccgtgtgtggttcccgcgggcctggcctctttacgggttatggc |
| | | ccttgcgtgccttgaattacttccacctggctgcagtacgtgattcttgatcccgagcttcgggttggaagtggggggagagttc |
| | | gaggccttgcgcttaaggagccccttcgcctcgtgcttgagttgaggcctggcctgggcgctggggccgccgcgtgcgaatct |
| | | ggtggcaccttcgcgcctgtctcgctgctttcgataagtctctagccatttaaaatttttgatgacctgctgcgacgctttttttctggc |
| | | aagatagtcttgtaaatgcgggccaagatctgcacactggtatttcggtttttggggccgcgggcggcgacggggcccgtgc |
| | | gtcccagcgcacatgttcggcgaggcggggcctgcgagcgcggccaccgagaatcggacgggggtagtctcaagctgg |
| | | ccggcctgctctggtgcctggcctcgcgccgccgtgtatcgccccgccctgggcggcaaggctggcccggtcggcaccagt |
| | | tgcgtgagcggaaagatggccgcttcccggccctgctgcagggagctcaaaatggaggacgcggcgctcgggagagcg |
| | | ggcgggtgagtcacccacacaaaggaaaagggcctttccgtcctcagccgtcgcttcatgtgactccacggagtaccgggc |
| | | gccgtccaggcacctcgattagttctcgagcttttggagtacgtcgtctttaggttggggggaggggttttatgcgatggagtttcc |
| | | ccacactgagtgggtggagactgaagttaggccagcttggcacttgatgtaattctccttggaatttgccctttttgagtttggatct |
| | | tggttcattctcaagcctcagacagtggttcaaagtttttttcttccatttcaggtgtcgtgaGGATCCgccaccatggtcagca |
| | | agggcgaggaactgttcaccggggtggtgcccatcctggtcgagctggacggcgacgtaaacggccacaagttcagcgtg |
| | | tccggcgagggcgagggcgatgccacctacggcaagctgaccctgaagttcatctgtaccaccggcaagctgcccgtgcc |
| | | ctggcccaccctcgtgaccaccctgacctacggcgtgcaatgcttcagccgctaccccgaccacatgaagcagcacgactt |
| | | cttcaagtccgccatgcccgaaggctacgtccaggagcgcaccatcttcttcaaggacgacggcaactacaagacccgcg |
| | | ccgaggtgaagttcgagggcgacaccctggtgaaccgcatcgagctgaagggcatcgacttcaaggaggacggcaaca |
| | | tcctggggcacaagctggagtacaactacaacagccacaacgtctatatcatggccgacaagcagaagaacggcatcaa |
| | | ggtgaacttcaagatccgccacaacatcgaggacggcagcgtgcaactcgccgaccactaccagcagaacacccccat |
| | | cggcgacggccccgtgctgctgcccgacaaccactacctgagcacccagtccgccctgagcaaagaccccaacgagaa |
| | | gcgcgatcacatggtcctgctggagttcgtgaccgccgccgggatcactctcggcatggacgagctgtacaagGGAAG |
| | | CGGAGCTACTAACTTCAGCCTGCTGAAGCAGGCTGGCGACGTGGAGGAGAACCCT |
| | | GGACCTATGGTTACAGAGTATAAACCTACGGTCCGACTCGCAACGAGAGATGATGT |
| | | GCCCCGCGCGGTTCGCACACTTGCGGCAGCTTTTGCTGACTATCCCGCGACTCGGC |
| | | ATACGGTCGATCCGGACCGACATATCGAGCGCGTAACAGAACTTCAAGAACTCTTTC |
| | | TCACAAGAGTTGGACTTGACATTGGGAAGGTATGGGTAGCCGATGACGGTGCGGCT |
| | | GTTGCGGTATGGACAACACCCGAAAGTGTAGAGGCAGGCGCGGTCTTCGCTGAGAT |
| | | CGGTCCGCGGATGGCCGAACTGTCCGGTTCACGATTGGCGGCGCAACAACAAATG |
| | | GAGGGTCTCCTCGCTCCACATAGACCTAAAGAGCCAGCGTGGTTTCTTGCCACAGT |
| | | GGGCGTTAGCCCCGACCACCAGGGTAAGGGACTTGGGAGCGCAGTTGTATTGCCA |
| | | GGAGTTGAAGCGGCCGAGAGGGCGGGCGTACCAGCGTTCCTTGAGACATCTGCGC |
| | | CCCGCAACCTGCCCTTTTACGAACGCCTCGGATTCACCGTCACCGCCGATGTAGAG |
| | | GTCCCAGAAGGTCCCAGAACCTGGTGCATGACCCGGAAACCCGGGGCGTGAgtttaaa |
| | | cccgcAAGCTTgcctcgactgtgccttctagttgccagccatctgttgtttgcccctcccccgtgccttccttgaccctggaag |
| | | gtgccactcccactgtcctttcctaataaaatgagaaaattgcatcgcattgtctgagtaggtgtcattctattctggggggtggg |
| | | gtggggcaggacagcaagggggaggattgggaagacaatagcaggcatgctggggatgcggtgggctctatggtcttcc |
| | | gcttcctcgctcactgactcgctgcgctcggtcgttcggctgcggcgagcggtatcagctcactcaaaggcggtaatacggtta |
| | | tccacagaatcaggggataacgcaggaaagaacatgtgagcaaaaggccagcaaaaggccaggaaccgtaaaaag |
| | | gccgcgttgctggcgtttttccataggctccgcccccctgacgagcatcacaaaaatcgacgctcaagtcagaggtggcgaa |
| | | acccgacaggactataaagataccaggcgtttccccctggaagctccctcgtgcgctctcctgttccgaccctgccgcttacc |
| | | ggatacctgtccgcctttctcccttcgggaagcgtggcgctttctcatagctcacgctgtaggtatctcagttcggtgtaggtcgtt |
| | | cgctccaagctgggctgtgtgcacgaaccccccgttcagcccgaccgctgcgccttatccggtaactatcgtcttgagtccaa |
| | | cccggtaagacacgacttatcgccactggcagcagccactggtaacaggattagcagagcgaggtatgtaggcggtgcta |
| | | cagagttcttgaagtggtggcctaactacggctacactagaagaacagtatttggtatctgcgctctgctgaagccagttacctt |
| | | cggaaaaagagttggtagctcttgatccggcaaacaaaccaccgctggtagcgg |

[0709] Genomic DNA was harvested 3 days after transduction. Data for cell viability is shown in FIG. 30C. Data for programmable gene insertion (PGI) is shown in FIG. 30D. As shown in FIG. 30D shows that PL1323 and PL1325 yield up to 30% PGI in Clone 52 and up to 20% in Clone 17.

[0710] The PGI in pluripotent stem cells was also evaluated at day 6 after transduction. FIG. 31A shows ddPCR data for PGI for clone 52 at day 3 and day 6. Flow cytometry was used to assess GFP expression which indicates programmable gene insertion (PGI) (see FIG. 31B). This data shows that PL1323 and PL1325 yield % GFP+ cells by flow ˜50%.

### 7.16. Example 16: Assessment of Engineered Integration Enzyme in Hematopoietic Stem Cells

[0711] Engineered integrases were also assessed for their ability to mediate programmable gene insertion in hematopoietic stem cells.

[0712] For these experiments, the engineered integrases were introduced into a hematopoietic stem cell along with a gene editor polypeptide (i.e., mRNA encoding a gene editor polypeptide (i.e., a Cas9 nickase fused to a reverse transcriptase)); an atgRNA comprising a spacer sequence a scaffold, an RT template comprising an integration recognition site, and a primer binding site; and a donor polynucleotide template comprising a cognate integration recognition site. AtgRNA sequences used in this Example are provided in Table 23 below.

TABLE 23

| SEQ ID | atgRNA | |
|---|---|---|
| NO: | pair name | atgRNA sequence with modifications (5′-3′) |
| 595 | hB2M-AA- | mU*mC*mC*rUrGrArArGrCrUrGrArCrArGrCrArUrUrCrGrUrUrUrUrArGrAmGmCmUm |
| | 1-GT | AmGmAmAmAmUmAmGmCrArArGrUrUrArArArArUrArArGrGrCrUrArGrUrCrCrGrUrU |
| | bmp002 | rArUrCrAmAmCmUmUmGmAmAmAmAmAmGmUmGmGmCmAmCmCmGmAmGmU |
| | | mCmGmGmUmGmCrArUrGrArUrCrCrUrGrArCrGrArCrGrGrArGrArCrCrGrCrCrGrUrC |
| | | rGrUrCrGrArCrArArGrCrCrCrUrGrCrUrGrUrCrArGrCrUrUrCmU*mU*mU*mU |
| 596 | hB2M-AA- | mG*mA*mG*rGrArArGrGrArCrCrArGrArGrCrGrGrGrArGrUrUrUrUrArGrAmGmCmUm |
| | 1-GT atg- | AmGmAmAmAmUmAmGmCrArArGrUrUrArArArArUrArArGrGrCrUrArGrUrCrCrGrUrU |
| | R bmp002 | rArUrCrAmAmCmUmUmGmAmAmAmAmAmGmUmGmGmCmAmCmCmGmAmGmU |
| | | mCmGmGmUmGmCrGrGrCrUrUrGrUrCrGrArCrGrArCrGrGrCrGrGrUrCrUrCrCrGrUr |
| | | CrGrUrCrArGrGrArUrCrArUrCrGrCrUrCrUrGrGrUrCrCrUrUmU*mU*mU*mU |
| 597 | hB2M-1- | mU*mC*mC*rUrGrArArGrCrUrGrArCrArGrCrArUrUrCrGrUrUrUrUrArGrArGrCrUrArGr |
| | 38-20-atg- | ArArArUrArGrCrArArGrUrUrArArArArUrArArGrGrCrUrArGrUrCrCrGrUrUrArUrCrArArC |
| | F bmp001 | rUrUrGrArArArArArGrUrGrGrCrArCrCrGrArGrUrCrGrGrUrGrCrArCrGrArCrGrGrArGrA |
| | | rCrCrGrCrCrGrUrCrGrUrCrGrArCrArArGrCrCrUrGrCrUrGrUrCrArGrC*mU*mU*mC |
| 598 | hB2M-1- | mG*mA*mG*rGrArArGrGrArCrCrArGrArGrCrGrGrGrArGrUrUrUrUrArGrArGrCrUrArGr |
| | 38-20-atg- | ArArArUrArGrCrArArGrUrUrArArArArUrArArGrGrCrUrArGrUrCrCrGrUrUrArUrCrArArC |
| | R bmp001 | rUrUrGrArArArArArGrUrGrGrCrArCrCrGrArGrUrCrGrGrUrGrCrArCrGrArCrGrGrCrGr |
| | | GrUrCrUrCrCrGrUrCrGrUrCrArGrGrArUrCrArUrCrGrCrUrCrUrGrGrUrC*mC*mU*mU |
| 599 | hCIITA- | mU*mC*mA*rArCrUrGrCrGrArCrCrArGrUrUrCrArGrCrGrUrUrUrUrArGrAmGmCmUm |
| | AA-3-GG | AmGmAmAmAmUmAmGmCrArArGrUrUrArArArArUrArArGrGrCrUrArGrUrCrCrGrUrU |
| | atg-F | rArUrCrAmAmCmUmUmGmAmAmAmAmAmGmUmGmGmCmAmCmCmGmAmGmU |
| | bmp002 | mCmGmGmUmGmCrArUrGrArUrCrCrUrGrArCrGrArCrGrGrArGrCrCrCrGrCrCrGrUrC |
| | | rGrUrCrGrArCrArArGrCrCrCrArUrUrArGrArArCrUrGrGrUrCrGrCrArGmU*mU*mU*mU |
| 600 | hCIITA- | mG*mA*mU*rArUrUrGrGrCrArUrArArGrCrCrUrCrCrCrGrUrUrUrUrArGrAmGmCmUm |
| | AA-3-GG | AmGmAmAmAmUmAmGmCrArArGrUrUrArArArArUrArArGrGrCrUrArGrUrCrCrGrUrU |
| | atg-R | rArUrCrAmAmCmUmUmGmAmAmAmAmAmGmUmGmGmCmAmCmCmGmAmGmU |
| | bmp002 | mCmGmGmUmGmCrGrGrCrUrUrGrUrCrGrArCrGrArCrGrGrCrGrGrGrCrUrCrCrGrUr |
| | | CrGrUrCrArGrGrArUrCrArUrArGrGrCrUrUrArUrGrCrCrArAmU*mU*mU*mU |
| 601 | hAAVS1- | mG*mG*mG*rGrCrCrArCrUrArGrGrGrArCrArGrGrArUrGrUrUrUrUrArGrAmGmCmUm |
| | AA-2 atg- | AmGmAmAmAmUmAmGmCrArArGrUrUrArArArArUrArArGrGrCrUrArGrUrCrCrGrUrU |
| | F bmp002 | rArUrCrAmAmCmUmUmGmAmAmAmAmAmGmUmGmGmCmAmCmCmGmAmGmU |
| | | mCmGmGmUmGmCrArUrGrArUrCrCrUrGrArCrGrArCrGrGrArGrGrUrCrGrCrCrGrUrC |
| | | rGrUrCrGrArCrArArGrCrCrCrCrUrGrUrCrCrCrUrArGrUrGrGmU*mU*mU*mU |
| 602 | hAAVS1- | mA*mG*mA*rCrCrCrArArUrArUrCrArGrGrArGrArCrUrGrUrUrUrUrArGrAmGmCmUmA |
| | AA-2 atg- | mGmAmAmAmUmAmGmCrArArGrUrUrArArArArUrArArGrGrCrUrArGrUrCrCrGrUrUr |
| | R bmp002 | ArUrCrAmAmCmUmUmGmAmAmAmAmAmGmUmGmGmCmAmCmCmGmAmGmU |
| | | mCmGmGmUmGmCrGrGrCrUrUrGrUrCrGrArCrGrArCrGrGrCrGrArCrCrUrCrCrGrUr |
| | | CrGrUrCrArGrGrArUrCrArUrCrUrCrCrUrGrArUrArUrUrGrGmU*mU*mU*mU |
| 603 | CXCR4 | mC*mA*mU*rCrUrUrUrGrCrCrArArCrGrUrCrArGrUrGrGrUrUrUrUrArGrArGrCrUrArGr |
| | 38-38 atg- | ArArArUrArGrCrArArGrUrUrArArArArUrArArGrGrCrUrArGrUrCrCrGrUrUrArUrCrArArC |
| | F end mod | rUrUrGrArArArArArGrUrGrGrCrArCrCrGrArGrUrCrGrGrUrGrCrArUrGrArUrCrCrUrGrA |
| | | rCrGrArCrGrGrArGrArCrCrGrCrCrGrUrCrGrUrCrGrArCrArArGrCrCrUrGrArCrGrUrUr |
| | | GrGrC*mA*mA*mA |
| 604 | CXCR4 | mC*mA*mA*rCrCrArCrCrCrArCrArArGrUrCrArUrUrGrGrUrUrUrUrArGrArGrCrUrArGr |
| | 38-38 atg- | ArArArUrArGrCrArArGrUrUrArArArArUrArArGrGrCrUrArGrUrCrCrGrUrUrArUrCrArArC |
| | Rend | rUrUrGrArArArArArGrUrGrGrCrArCrCrGrArGrUrCrGrGrUrGrCrGrGrCrUrUrGrUrCrGr |
| | mod | ArCrGrArCrGrGrCrGrGrUrCrUrCrCrGrUrCrGrUrCrArGrGrArUrCrArUrUrGrArCrUrUrG |
| | | rUrGrG*mG*mU*mG |
| 605 | CXCR4 | mC*mA*mU*rCrUrUrUrGrCrCrArArCrGrUrCrArGrUrGrGrUrUrUrUrArGrArGrCrUrArGr |
| | dual | ArArArUrArGrCrArArGrUrUrArArArArUrArArGrGrCrUrArGrUrCrCrGrUrUrArUrCrArArC |
| | atgRNA | rUrUrGrArArArArArGrUrGrGrCrArCrCrGrArGrUrCrGrGrUrGrCrArCrGrArCrGrGrArGrA |
| | Fw-AttB38 | rCrCrGrCrCrGrUrCrGrUrCrGrArCrArArGrCrCrUrGrArCrGrUrUrGrGrC*mA*mA*mA |
| | 20 end | |
| | mod | |
| 606 | CXCR4 | mC*mA*mA*rCrCrArCrCrCrArCrArArGrUrCrArUrUrGrGrUrUrUrUrArGrArGrCrUrArGr |
| | dual | ArArArUrArGrCrArArGrUrUrArArArArUrArArGrGrCrUrArGrUrCrCrGrUrUrArUrCrArArC |
| | atgRNA | rUrUrGrArArArArArGrUrGrGrCrArCrCrGrArGrUrCrGrGrUrGrCrArCrGrArCrGrGrCrGr |
| | Rv-AttB38 | GrUrCrUrCrCrGrUrCrGrUrCrArGrGrArUrCrArUrUrGrArCrUrUrGrUrGrG*mG*mU*mG |
| | 20 end | |
| | mod | |
| 607 | TRAC-AM | mU*mG*mG*rCrArUrCrUrGrGrArCrUrCrCrArGrCrCrUrGrUrUrUrUrArGrAmGmCmUm |
| | atg-F | AmGmAmAmAmUmAmGmCrArArGrUrUrArArArArUrArArGrGrCrUrArGrUrCrCrGrUrU |
| | bmp002 | rArUrCrAmAmCmUmUmGmAmAmAmAmAmGmUmGmGmCmAmCmCmGmAmGmU |
| | | mCmGmGmUmGmCrArUrGrArUrCrCrUrGrArCrGrArCrGrGrArGrArGrCrGrCrCrGrUrC |
| | | rGrUrCrGrArCrArArGrCrCrCrCrUrGrGrArGrUrCrCrArGrArUmU*mU*mU*mU |
| 608 | TRAC-AM | mA*mG*mA*rGrUrCrUrCrUrCrArGrCrUrGrGrUrArCrArGrUrUrUrUrArGrAmGmCmUm |
| | atg-R | AmGmAmAmAmUmAmGmCrArArGrUrUrArArArArUrArArGrGrCrUrArGrUrCrCrGrUrU |
| | bmp002 | rArUrCrAmAmCmUmUmGmAmAmAmAmAmGmUmGmGmCmAmCmCmGmAmGmU |
| | | mCmGmGmUmGmCrGrGrCrUrUrGrUrCrGrArCrGrArCrGrGrCrGrCrUrCrUrCrCrGrUr |
| | | CrGrUrCrArGrGrArUrCrArUrArCrCrArGrCrUrGrArGrArGrAmU*mU*mU*mU |
| 609 | TRAC | mU*mG*mG*rCrArUrCrUrGrGrArCrUrCrCrArGrCrCrUrGrUrUrUrUrArGrArGrCrUrArGr |
| | dual | ArArArUrArGrCrArArGrUrUrArArArArUrArArGrGrCrUrArGrUrCrCrGrUrUrArUrCrArArC |
| | atgRNA | rUrUrGrArArArArArGrUrGrGrCrArCrCrGrArGrUrCrGrGrUrGrCrArCrGrArCrGrGrArGrA |
| | Fw-AttB38 | rCrCrGrCrCrGrUrCrGrUrCrGrArCrArArGrCrCrCrUrGrGrArGrUrCrCrA*mG*mA*mU |
| | 20 end | |
| | mod | |
| 610 | TRAC | mA*mG*mA*rGrUrCrUrCrUrCrArGrCrUrGrGrUrArCrArGrUrUrUrUrArGrArGrCrUrArGr |
| | dual | ArArArUrArGrCrArArGrUrUrArArArArUrArArGrGrCrUrArGrUrCrCrGrUrUrArUrCrArArC |
| | atgRNA | rUrUrGrArArArArArGrUrGrGrCrArCrCrGrArGrUrCrGrGrUrGrCrArCrGrArCrGrGrCrGr |
| | Rv-AM- | GrUrCrUrCrCrGrUrCrGrUrCrArGrGrArUrCrArUrArCrCrArGrCrUrGrArG*mA*mG*mA |
| | AttB38 20 | |
| | end mod | |

[0713] In these experiments, a dual electroporation approach was used. In one experimental condition, the engineered integrase, the gene editor polypeptide (i.e., mRNA encoding a gene editor polypeptide), and the atgRNA were introduced into a cell using a first electroporation and the donor polynucleotide template was introduced into the cell using a second electroporation. In a second experimental condition, the gene editor polypeptide (i.e., mRNA encoding a gene editor polypeptide), and the atgRNA were introduced into a cell using a first electroporation and the engineered integrase and the donor polynucleotide template (mini circle) were introduced into the cell using a second electroporation. Engineered integrases used in these experiments are as shown in FIG. 32A.

[0714] Genomic DNA was harvested 3 days after transduction. Data for programmable gene insertion (PGI) is shown in FIG. 32B. This data shows that a BxB1 integrase engineered to include a stabilon motif improves PGI by 3-5 fold.

### 7.17. Example 17: Assessment of Additional Engineered Integration Enzymes

[0715] Additional iterations of engineered integration enzymes were tested for PGI (measured as beacon occupancy). In particular, BxB1 was engineered to include a stabilon domain or an Exin21 domain (see, e.g., engineered integration enzymes shown in FIG. 33 (see also Table 26)).

[0716] For these experiments, the engineered integration enzymes described in FIG. 33 were introduced into a HEK293 cell along with a gene editor polypeptide (i.e., mRNA encoding a gene editor polypeptide (i.e., a Cas9 nickase fused to a reverse transcriptase)); an atgRNA comprising a spacer sequence with sequence complementarity to a sequence in the human factor IX locus, a scaffold, an RT template comprising an integration recognition site, and a primer binding site (see Table 19 above for atgRNA sequences); and a donor polynucleotide template comprising a cognate integration recognition site. The data is shown in FIG. 34. The sub-set of engineered BxB1 integrases shown in FIG. 35 (see also Table 26) were selected for further study.

### 7.18. Example 18: Assessment of Engineered Integration Enzymes Comprising an Amino Acid Modification in a Degron Motif

[0717] BxBT integrases were engineered to include an amino acid modification with the aim that the modification would improve stability (e.g., half-life). FIG. 36A shows degron motifs and lysine residues that are candidate for amino acid modifications that may increase the stability of a BxBT integrase.

[0718] In these experiments, a BxBT was engineered to substitute a lysine for an arginine at position 10. Half-life of the integrase was assessed 24 and 48 hours after transduction into the cell using western blot (see FIG. 36B). This data showed that a specific lysine to arginine substitution (K10R) did not alter the stability of BxBT. Further assessment is ongoing to determine whether substituting another lysine residue (see, e.g., FIG. 36A) would be sufficient to increase the stability of the BxBT integrase.

### 7.19. Example 19: Assessment of mRNA Optimization to Increase Stability of mRNA Encoding BxB1

[0719] In another set of experiments, mRNAs encoding BxB1 were optimized with the aim of improving stability (i.e., half-life of the mRNA) upon being introduced into a cell.

[0720] In these experiments, the mRNA encoding BxB1 was optimized using the LinearDesign algorithm described in Zhang et al. (Algorithm for Optimized mRNA Design Improves Stability and Immunogenicity, Nature 2023, doi.org/10.1038/s41586-023-06127-z), which is hereby incorporated by reference in its entirety. LinearDesign optimizes both structural stability via second structure and codon usage.

[0721] FIGS. 37A-37B show first generations attempts at optimizing BxBT RNA structure using the linear design algorithm comparing non-optimized mRNA encoding BxB1 in FIG. 37A with optimized mRNA encoding BxBT in FIG. 37B.

[0722] FIGS. 38A-38B show first generations attempts at optimizing an RNA structure for RNA encoding nCas9-RT using the LinearDesign algorithm comparing non-optimized mRNA encoding nCas9-RT in FIG. 38A with optimized mRNA encoding nCsa9-RT in FIG. 38B.

[0723] The nCas9-RTs in FIGS. 38A-38B, were tested for their ability to insert integration recognition sites into a genome at the human factor IX locus. In particular, the nCas9-RTs in FIGS. 38A-38B were introduced into a cell along with an atgRNA comprising a spacer sequence with sequence complementarity to a sequence in the human factor IX locus, a scaffold, an RT template comprising an integration recognition site, and a primer binding site (see Table 19 above in Example 11 for atgRNA sequences). Beacon placement data is shown in FIG. 39. The expectation was that the LinearDesign codon optimized mRNA would have a longer half-life due in at least in part to the second structure—predominately folded, which should lead to higher beacon placement. However, the linear design approach and the algorithm predicted codons didn't perform as anticipated.

### 7.20. Example 20: Assessment of Fusion Proteins Comprising Engineered Integration Enzymes and a Gene Editor Polypeptide

[0724] Fusion proteins comprising an nCas9-RT are fused with engineered integration enzymes (e.g, BxB1) and tested for their ability to mediate PGI.

[0725] For these experiments, fusion proteins included those as shown in FIG. 40 (see also Table 26). These fusions proteins are introduced into cells along with an atgRNA and a donor polynucleotide template. Genomic DNA is harvested three days after transduction.

### 7.21. Example 21: Assessment of Split Fusion Proteins

[0726] Fusion proteins comprising a nCas9 and RT are fused with engineered integration enzymes (e.g., BxBT) in various combinations and tested for their ability to mediate PGI.

[0727] For these experiments, fusion proteins included those as shown in FIG. 41 (see also Table 26). These fusions proteins are introduced into cells along with an atgRNA and a donor polynucleotide template. Genomic DNA is harvested three days after transduction.

### 7.22. Example 22: Additional Assessment of Engineered Integration Enzyme in Induced Pluripotent Stem Cells

[0728] Engineered integration enzymes described and designed herein, including those in FIG. 42 (see also Table 26), were assessed for their ability to mediate PGI in pluripotent stem cells. A non-limiting exemplary workflow is as described in FIG. 30A.

[0729] For these experiments, the engineered integrases were introduced into a pluripotent stem cell clone 52 or clone 17 along and a donor polynucleotide template comprising a cognate integration recognition site (PL1113 (SEQ ID NO: 591; see Table 22) or PL2134. iPSC clones 52 and 17 include beacons site-specifically integrated into their genomes.

### Electroporation Conditions—

| | |
|---|---|
| Media | E8 media |
| Coating | Vitronectin |
| Cells/rxn | 1e5 cells |
| EP Program | 1200 V, 30 ms, 1 pulse |
| Recovery | E8 + CloneR2 24 h post-EP |
| Bxb1 mRNA | 2 ug/rxn |
| PL1113 [GT] Or PL2134 | 1 ug/rxn |

[0730] Genomic DNA was harvested 3 days after transduction. Digital droplet PCR (ddPCR) data for programmable gene insertion (PGI) with PL1113 donor at day 3 is shown in FIG. 43 for the indicated engineered BxBT polypeptides. Flow cytometry data for PGI with PL1113 donor at day 7 is shown in FIGS. 44A and 44B. FIG. 44A provides a comparison between percent PGI between ddPCR data and flow cytometry data. Flow cytometry was used to assess GFP expression, which indicates programmable gene insertion (PGI). As shown in FIG. 45, PGI with PL2134 donor was also assessed and compared to PGI with PL11113. This data shows that PGI was higher with PL11113 than PL2134.

### 7.23. Example 23: Assessment of Engineered Integration Enzymes Fused to a Gene Editor Polypeptide

[0731] Engineered integration enzymes fused to a gene editor polypeptide as described and designed herein, including those in FIG. 46 (see also Table 26), were assessed for their ability to mediate PGI. The engineered integration enzymes fused to a gene editor polypeptide are referred to herein as the all-in-one constructs.

[0732] In a first set of experiments, mRNA encoding the engineered integrases from FIG. 46 were introduced into a primary human hepatocytes (line HU8403) along with a pair of atgRNA (AA089: atgRNA1 is SEQ ID NO: 611 and atgRNA2 is SEQ ID NO: 612 (see Table 24)). Electroporation was performed as described elsewhere herein (see Example 22). mRNA was electroporated at either 187 fmol or 374 fmol. Controls included mRNA encoding nCas9-RT with and without a stabilization domain and a mRNA encoding RT-IRES-nCas9.

TABLE 24

| SEQ | | |
|---|---|---|
| ID | | |
| NO: | Name | Sequence |
| 611 | AA089 | CUUGUAUGCCCCGAGAAGUGGUUUUAGAGCUAGAAAUAGCAAGUUAAAAUAA |
| | atgRNA- | GGCUAGUCCGUUAUCAACUUGAAAAAGUGGCACCGAGUCGGUGCACGACGG |
| | modRNA478 | AGACCGCCGUCGUCGACAAGCCUUCUCGGGGCAUAUUUU |
| 728 | atg1 | m(C)[sp].m(U)[sp].m(U)[sp].r(G)p.r(U)p.r(A)p.r(U)p.r(G)p.r(C)p.r(C)p. |
| (mod) | (modRNA478) | r(C)p.r(C)p.r(G)p.r(A)p.r(G)p.r(A)p.r(A)p.r(G)p.r(U)p.r(G)p.r(G)p.r(U)p. |
| | RNA Helm | r(U)p.r(U)p.r(U)p.r(A)p.r(G)p.r(A)p.m(G)p.m(C)p.m(U)p.m(A)p.m(G)p.m(A)p. |
| | annotation | m(A)p.m(A)p.m(U)p.m(A)p.m(G)p.m(C)p.r(A)p.r(A)p.r(G)p.r(U)p.r(U)p.r(A)p. |
| | | r(A)p.r(A)p.r(A)p.r(U)p.r(A)p.r(A)p.r(G)p.r(G)p.r(C)p.r(U)p.r(A)p.r(G)p. |
| | | r(U)p.r(C)p.r(C)p.r(G)p.r(U)p.r(U)p.r(A)p.r(U)p.r(C)p.r(A)p.m(A)p.m(C)p. |
| | | m(U)p.m(U)p.m(G)p.m(A)p.m(A)p.m(A)p.m(A)p.m(A)p.m(G)p.m(U)p.m(G)p.m(G)p. |
| | | m(C)p.m(A)p.m(C)p.m(C)p.m(G)p.m(A)p.m(G)p.m(U)p.m(C)p.m(G)p.m(G)p.m(U)p. |
| | | m(G)p.m(C)p.r(A)p.r(C)p.r(G)p.r(A)p.r(C)p.r(G)p.r(G)p.r(A)p.r(G)p.r(A)p. |
| | | r(C)p.r(C)p.r(G)p.r(C)p.r(C)p.r(G)p.r(U)p.r(C)p.r(G)p.r(U)p.r(C)p.r(G)p. |
| | | r(A)p.r(C)p.r(A)p.r(A)p.r(G)p.r(C)p.r(C)p.r(U)p.r(U)p.r(C)p.r(U)p.r(C)p. |
| | | r(G)p.r(G)p.r(G)p.r(G)p.r(C)p.r(A)p.r(U)p.r(A)p.m(U)[sp].m(U)[sp]. |
| | | m(U)[sp].m(U)p |
| 612 | modRNA479 | UAUAUAUACUUGCUAGGGCUGUUUUAGAGCUAGAAAUAGCAAGUUAAAAUAA |
| | RNA | GGCUAGUCCGUUAUCAACUUGAAAAAGUGGCACCGAGUCGGUGCACGACGG |
| | | CGGUCUCCGUCGUCAGGAUCAUCCUAGCAAGUAUAUUUU |
| 729 | modRNA479 | m(U)[sp].m(A)[sp].m(U)[sp].r(A)p.r(U)p.r(A)p.r(U)p.r(A)p.r(C)p.r(U)p. |
| (mod) | Helm | r(U)p.r(G)p.r(C)p.r(U)p.r(A)p.r(G)p.r(G)p.r(G)p.r(C)p.r(U)p.r(G)p.r(U)p. |
| | | r(U)p.r(U)p.r(U)p.r(A)p.r(G)p.r(A)p.m(G)p.m(C)p.m(U)p.m(A)p.m(G)p.m(A)p. |
| | | m(A)p.m(A)p.m(U)p.m(A)p.m(G)p.m(C)p.r(A)p.r(A)p.r(G)p.r(U)p.r(U)p.r(A)p. |
| | | r(A)p.r(A)p.r(A)p.r(U)p.r(A)p.r(A)p.r(G)p.r(G)pr(C)p.r(U)p.r(A)p.r(G)p. |
| | | r(U)p.r(C)p.r(C)p.r(G)p.r(U)p.r(U)p.r(A)p.r(U)p.r(C)p.r(A)p.m(A)p.m(C)p. |
| | | m(U)p.m(U)p.m(G)p.m(A)p.m(A)p.m(A)p.m(A)p.m(A)p.m(G)p.m(U)p.m(G)p.m(G)p. |
| | | m(C)p.m(A)p.m(C)p.m(C)p.m(G)p.m(A)p.m(G)p.m(U)p.m(C)p.m(G)p.m(G)p.m(U)p. |
| | | m(G)p.m(C)p.r(A)p.r(C)p.r(G)p.r(A)p.r(C)p.r(G)p.r(G)p.r(C)p.r(G)p.r(G)p. |
| | | r(U)p.r(C)p.r(U)p.r(C)p.r(C)p.r(G)p.r(U)p.r(C)p.r(G)p.r(U)p.r(C)p.r(A)p. |
| | | r(G)p.r(G)p.r(A)p.r(U)p.r(C)p.r(A)p.r(U)p.r(C)p.r(C)p.r(U)p.r(A)p.r(G)p. |
| | | r(C)p.r(A)p.r(A)p.r(G)p.r(U)p.r(A)p.r(U)p.r(A)p.m(U)[sp].m(U)[sp]. |
| | | m(U)[sp].m(U)p |

[0733] Genomic DNA was harvested 4 days after electroporation. Digital droplet PCR (ddPCR) was used to assess beacon placement for each of the constructs tested (see FIG. 46). As shown in FIG. 47, ddPCR data for beacon placement revealed for the all-in-one mRNAs were slightly lower than the control (PL883) but were comparable. Notably, the nCas9-RT-Bxb1 orientation produced more efficient beacon placement compared to the Bxb1-nCas9-RT orientation (see FIG. 47).

[0734] In a second set of experiments, mRNA encoding PL1931 ((SEQ ID NO: 631 (amino acid) and SEQ ID NO: 632 (nucleic acid); see FIG. 46) was introduced into a primary human hepatocyte (line HU8403) along with a pair of atgRNA (AA115 (atgRNA1 (SEQ ID NO: 613) and atgRNA2 (SEQ ID NO: 614); see Table below) using MessengerMax lipofection. At day 0, 33,000 HU8403 cells were plated per well and MessengerMax, 0.15 μl atgRNA pair, and either 0.15 μl or 0.3 d of various concentrations of Bxb1 mRNA (see FIG. 48). PL883 (SEQ ID NO: 617) was used as a control. Genomic DNA was harvested 4 days after lipofection. Digital droplet PCR (ddPCR) was used to assess beacon placement. As shown in FIG. 48, beacon placement was similar between mRNA PL1931 and mRNA PL883 at equimolar input.

TABLE 25

| SEQ | | |
|---|---|---|
| ID | | |
| NO: | Name | Sequence |
| 613 | atgRNA1 | UUGGCUUCUAAAAGGAGUUUGUUUUAGAGCUAGAAAUAGCAAGUUA |
| | modRNA519 | AAAUAAGGCUAGUCCGUUAUCAACUUGAAAAAGUGGCACCGAGUCGG |
| | RNA | UGCACGACGGAGACCGCCGUCGUCGACAAGCCCUCCUUUUAGAAG |
| 730 | atgRNA1 | m(U)[sp].m(U)[sp].m(G)[sp].r(G)p.r(C)p.r(U)p.r(U)p.r(C)p.r(U)p.r(A)p.r(A)p. |
| (mod) | modRNA519 | r(A)p.r(A)p.r(G)p.r(G)p.r(A)p.r(G)p.r(U)p.r(U)p.r(U)p.r(G)p.r(U)p.r(U)p. |
| | Helm | r(U)p.r(U)p.r(A)p.r(G)p.r(A)p.r(G)p.r(C)p.r(U)p.r(A)p.r(G)p.r(A)p.r(A)p. |
| | | r(A)p.r(U)p.r(A)p.r(G)p.r(C)p.r(A)p.r(A)p.r(G)p.r(U)p.r(U)p.r(A)p.r(A)p. |
| | | r(A)p.r(A)p.r(U)p.r(A)p.r(A)p.r(G)p.r(G)p.r(C)p.r(U)p.r(A)p.r(G)p.r(U)p. |
| | | r(C)p.r(C)p.r(G)p.r(U)p.r(U)p.r(A)p.r(U)p.r(C)p.r(A)p.r(A)p.r(C)p.r(U)p. |
| | | r(U)p.r(G)p.r(A)p.r(A)p.r(A)p.r(A)p.r(A)p.r(G)p.r(U)p.r(G)p.r(G)p.r(C)p. |
| | | r(A)p.r(C)p.r(C)p.r(G)p.r(A)p.r(G)p.r(U)p.r(C)p.r(G)p.r(G)p.r(U)p.r(G)p. |
| | | r(C)p.r(A)p.r(C)p.r(G)p.r(A)p.r(C)p.r(G)p.r(G)p.r(A)p.r(G)p.r(A)p.r(C)p. |
| | | r(C)p.r(G)p.r(C)p.r(C)p.r(G)p.r(U)p.r(C)p.r(G)p.r(U)p.r(C)p.r(G)p.r(A)p. |
| | | r(C)p.r(A)p.r(A)p.r(G)p.r(C)p.r(C)p.r(C)p.r(U)p.r(C)p.r(C)p.r(U)p.r(U)p. |
| | | r(U)p.r(U)p.r(A)p.r(G)[sp].m(A)[sp].m(A)[sp].m(G) |
| 614 | atgRNA2 | ACUGUUGCAAUAAUACCUAAGUUUUAGAGCUAGAAAUAGCAAGUUAAAAUAA |
| | modRNA566 | GGCUAGUCCGUUAUCAACUUGAAAAAGUGGCACCGAGUCGGUGCACGACGG |
| | RNA | CGGUCUCCGUCGUCAGGAUCAUGGUAUUAUUGCAA |
| s731 | atgRNA2 | m(A)[sp].m(C)[sp].m(U)[sp].r(G)p.r(U)p.r(U)p.r(G)p.r(C)p.r(A)p.r(A)p.r(U)p. |
| (mod) | modRNA566 | r(A)p.r(A)p.r(U)p.r(A)p.r(C)p.r(C)p.r(U)p.r(A)p.r(A)p.r(G)p.r(U)p.r(U)p. |
| | Helm | r(U)p.r(U)p.r(A)p.r(G)p.r(A)p.r(G)p.r(C)p.r(U)p.r(A)p.r(G)p.r(A)p.r(A)p. |
| | | r(A)p.r(U)p.r(A)p.r(G)p.r(C)p.r(A)p.r(A)p.r(G)p.r(U)p.r(U)p.r(A)p.r(A)p. |
| | | r(A)p.r(A)p.r(U)p.r(A)p.r(A)p.r(G)p.r(G)p.r(C)p.r(U)p.r(A)p.r(G)p.r(U)p. |
| | | r(C)p.r(C)p.r(G)p.r(U)p.r(U)p.r(A)p.r(U)p.r(C)p.r(A)p.r(A)p.r(C)p.r(U)p. |
| | | r(U)p.r(G)p.r(A)p.r(A)p.r(A)p.r(A)p.r(A)p.r(G)p.r(U)p.r(G)p.r(G)p.r(C)p. |
| | | r(A)p.r(C)p.r(C)p.r(G)p.r(A)p.r(G)p.r(U)p.r(C)p.r(G)p.r(G)p.r(U)p.r(G)p. |
| | | r(C)p.r(A)p.r(C)p.r(G)p.r(A)p.r(C)p.r(G)p.r(G)p.r(C)p.r(G)p.r(G)p.r(U)p. |
| | | r(C)p.r(U)p.r(C)p.r(C)p.r(G)p.r(U)p.r(C)p.r(G)p.r(U)p.r(C)p.r(A)p.r(G)p. |
| | | r(G)p.r(A)p.r(U)p.r(C)p.r(A)p.r(U)p.r(G)p.r(G)p.r(U)p.r(A)p.r(U)p.r(U)p. |
| | | r(A)p.r(U)p.r(U)p.r(G)[sp].m(C)[sp].m(A)[sp].m(A) |

[0735] In a third set of experiments, PGI in PHH was compared following lipofection with an mRNA encoding PL1931 (“all-in-one”) (SEQ ID NO: 631 (amino acid) and SEQ ID NO: 632 (nucleic acid)); see FIG. 46) or two mRNAs one encoding nCas9-RT and a second encoding BxB1. For these experiments, mRNA was introduced into PHH line HU8403 along with a pair of atgRNA (AA115) using MessengerMax lipofection. In particular, for the PL1931 all-in-one, 0.15 μl of atgRNA pair, and either 0.15 μl or 0.3 μl of various concentrations of Bxb1 mRNA were transduced into the PHH (see FIG. 49 for concentrations of BxB1). For the two mRNA condition (i.e., separate mRNA encoding nCas9-RT and BxB1), BxB1 was introduced at 210 fmol (or ˜125 ng) (note specific constructs included: PL1323 (cmyc-NLS-no stabilon), PL1325 (SV40-NLS-Stabilon), and PL1709 (SV40-exin2l-stabilon). For some conditions, a 3 lipoplex approach was used: guides 0.15 μl per well (20 mM) with 0.15 μl MessengerMax (or 30 μl MessengerMax); BxB1 mRNA at 250 ng with 0.15p MessengerMax (or 30 μl MessengerMax) per well; and nCas9-RT mRNA PL883 (SEQ ID NO: 617) fixed at 400 ng or 187 fmol with 0.15 μl MessemgerMax (or 30 μl MessengerMax) per well. Genomic DNA was harvested 4 days after lipofection. Digital droplet PCR (ddPCR) was used to assess PGI. As shown in FIG. 49, PGI was around 1% for each of the conditions tested. Looking closer at each PGI event, FIG. 50 and FIG. 51 show data for total edits (AttB+AttL). Analysis of whether MessengerMax volume impacted beacon placement revealed that increased MessengerMax volume decreased beacon placement but increased integration (FIG. 52). Analysis of the 3 lioplex approach in FIG. 53, revealed a 20-30% hit to beacon placement ratio observed with integration samples (3 lipo) compared to beacon only samples (2 lipo). This data shows that mRNAs encoding a BxB1-stabilon result in increased beacon occupancy compared to mRNA encoding BxB1 without a stabilon (see PL1323 (SEQ ID NO: 618 (amino acid) and SEQ ID NO: 619 (nucleic acid)).

[0736] Taken together, these experiments show that PL1931 all-in-one achieves full PGI in PHH; modulating MessengerMax volume decreases overall beacon placement but does increase integration and subsequent occupancy with the 2 lipoplex approach; and integration efficiency is similar from one shot transfections of all-in-one mRNA PL1931 (2 lipoplex) versus the two mRNA (separate nCas9-RT and BxB1).

### 7.24. Example 24: Mutations in the Zinc Ribbon Domain (ZD) Maintain Integration Activity while Improving Specificity (e.g., Reduced Off-Target Integration)

[0737] This experiment demonstrates that certain mutations in the zinc ribbon domain of LSR can improve specificity of such integrases to reduce or eliminate off-target integration.

[0738] Briefly, partly based on structural information, about 22 single residue mutations of the Bxb1 integrase were generated, at ZD domain residues 315, 316, 317, 318, 319, and 320. At each position, wild-type residue was mutated to a different category of amino acids. For example, A315 was mutated to acidic residues D and E, as well as basic residue R. G316, G317 and G318 were each independently mutated to polar residue Q, acidic residue E, basic residue R, and aromatic residue W. R319 was mutated to acidic residue E, polar residue Q, and aromatic residue W. K320 was mutated to polar residue Q, acidic residue E, basic residue R, and aromatic residue W. These mutants were introduced into a test mammalian cell line HEK293, in which integrase activity at the cognate integration recognition sequences attB/attP, or at non-cognate off-site integration recognition sequences (such as CAS031 or CAS 421, see FIG. 59) can be assessed based on, for example, the ability or efficiency of the integrase/eLSR to put a promoter sequence upstream of an otherwise promoterless reporter gene (such as a luciferase coding sequence), depending on the efficiency of using the cognate integration recognition sequences attB/attP, or the non-cognate off-site integration recognition sequences (such as CAS031 or CAS 421, see FIG. 59).

[0739] The results of such assays conducted in HEK293 cells showed that mutating residues A315 or K320 to a number of different amino acids can maintain on-beacon activity while decrease off-beacon activity as compared to wild type Bxb1 (FIGS. 55A and 55B). Similar results were observed in Primary Human Hepatocytes (PHH) (FIG. 56), in which mutations at A315 to R and K320 to E or R did not substantially impact on-beacon integration activity.

[0740] Among the tested mutations, K320E was one of the lead candidates with on-beacon activity comparable to wild type integrase and undetectable off-beacon activity (FIG. 55B). This mutation of K320E also led to a ˜2-fold increase in affinity for on-beacon sites and a 2-˜5-fold decrease in affinity for off-beacon sites (FIG. 57).

[0741] Consistent with the results discussed above, 8 of the selected eLSRs displayed reduced frequency and scope of off-target edits at 100 top off-target sites. All such so-called HiFi variant eLSRs exhibited improved off target integration percentage (%) vs wild type Bxb1 integrase, from which the eLSRs derived. Remarkably, the K320E single mutant decreased off-target recombination % by 41-fold as compared to that of wild type Bxb1 integrase (FIG. 58).

### 7.25. Example 25: Engineered Bxb1 Variants Improve Integrase Activity and Fidelity

### 7.25.1. Abstract

[0742] Many current genome editing technologies rely on the action of large serine integrases (LSIs) to insert gene-sized DNA sequences into the genome. Bxb1 is the most commonly used LSI for therapeutic efforts, including PASTE, PASSIGE and I-PGI. While Bxb1 demonstrated good activity in vitro in cycling cells, the activity in non-dividing hepatocytes was significantly less efficient. Further, wild-type Bxb1 is known to have detectable off target activity at cryptic genomic sites, which presents a potential safety risk for therapeutic development. To address these issues, we developed Bxb1 variants that demonstrate increased specificity and potency in vitro and have engineered stabilized Bxb1 variants that increase in vivo activity over 25-fold enabling targeted integration at therapeutically relevant levels.

### 7.25.2. Introduction

[0743] Large serine integrases (LSIs) can insert any size and sequence of DNA into a specific location, given the presence of two complimentary binding sites for the LSI (1). This has inspired both gene therapy applications as well as cell line creation technologies (2-9). All LSIs contain four major structural domains, two of which, the recombinase and zinc ribbon, are responsible for recognizing the LSI's DNA binding sites (10). Following binding of the DNA substrates (attB and attP), LSIs undergo a structural rearrangement and create a new DNA topology resulting in the insertion of DNA (11).

[0744] For many applications, the LSIs that seem to be the most studied are Bxb1 and PhiC31 (12). Bxb1 appears to be more active overall and has emerged as the enzyme of choice for large gene insertion therapies (6,8,9,13). Bxb1 can insert large DNA sequences without relying on any endogenous cellular DNA repair machinery (14). The cargo is delivered as a fully synthesized gene without need for DNA repair as the insertion is done seamlessly between two short attachment site sequences (10,11).

[0745] However, Bxb1 has two previously characterized limitations: specificity (off-targets) and low activity in certain cell types (6,7,13,15). Bxb1 can use imperfect attachment sites (cryptic sites) as locations for integration, several of which are present in the human genome (7,9,15). Wild-type Bxb1 also has relatively modest activity in cells (8,16). This makes it impractical to use for gene insertion as most cures rely on a minimum amount of active protein expression to be viable.

[0746] Here we describe a set of engineered and naturally occurring Bxb1 variants that overcome these limitations. These variants introduce mutations that lead to highly specific integrases and stabilization tags that increase in vivo activity. We anticipate that these enzymes will be of significant use in further efforts for large gene insertion for therapeutic benefit.

### 7.25.3. Results

### 7.25.3.1 Bxb1 is a Highly Active, Site-Specific Recombinase

[0747] Four molecules of a large serine integrase (LSI) bind two DNA substrates, attB and attP, and catalyze a topological rearrangement leading to two DNA products, attL and attR (FIG. 60A) (11). LSIs have a conserved structural organization: the N-terminal domain contains a dimerization domain and the catalytic serine, two domains for DNA binding, a recombinase domain, and a zinc ribbon domain and a coiled-coil domain that mediate tetramer formation between two LSI dimers (1). For Bxb1, the DNA sequences of the substrates and products are well-defined and contain known binding sites for the recombinase and zinc ribbon domains (17). In the absence of DNA, Bxb1 is a homodimer (FIG. 65A). Using gel shift assays with fluorescently labeled substrates, we can accurately measure the affinity of Bxb1 for DNA substrates (FIG. 60B). Bxb1 dimers bind with relatively high affinity to both the substrate and product with Bxb1 dimers binding to the product sequences, attL and attR, with affinities of around 3 nM, and to the substrate sequences, attB and attP, with slightly weaker affinity of around 12 nM (FIG. 60C). At high concentrations, slow migrating species forms, suggestive of non-productive multimerization, but there is no evidence for DNA rearrangement without both substrates being present.

[0748] In its native environment, Mycobacterium smegmatis, the Mycobacteriophage protein Bxb1 catalyzes the integration of its own phage genome into the genome of the mycobacterium (17). At a biochemical level, a Bxb1 dimer sits on either of the DNA substrates (either attP or attB) and then forms a tetramer bringing the two substrates into proximity (18). A serine in the active site of Bxb1 attacks the phosphodiester backbone creating a covalent phosphoserine linkage between all strands of the DNA and rotation of the two half-sites leads to the ligation of the DNA backbones and formation of attL and attR (18,19). Using a gel-based assay and substrates of varying length we can measure the specific activity of LSI's. Under saturating substrate conditions, Bxb1 can catalyze this reaction with a specific activity of 1.5 pmol/hr/mg Bxb1 (FIG. 60D). Further, in the absence of an accessory protein, Bxb1, like other LSIs, only catalyzes the forward reaction (20).

[0749] The DNA sequence of the substrates for Bxb1 has been well defined but the minimal attB sequence required for full recombination activity was unknown (17). We created a series of attB substrates that were all the same length (180 bp) but had the sequence of the attB mutated from either end. By measuring the activity of each of the substrates we were able to demonstrate that a 34-base-pair attB leads to a similar specific activity as the full-length, 46-base-pair attB (FIG. 60E).

### 7.25.3.2 Mutations in the Zinc Ribbon Domain Affect Bxb1 Activity in HEK293FT Cells

[0750] The zinc ribbon domain of Bxb1 is a compact DNA binding structure that is formed from two disparate regions in the linear sequence of Bxb1, with the coiled-coil domain inserted in the middle (FIG. 61A) (10,11,21). This organization is highly conserved among LSIs. Using the published structure of the Listeria innocua integrase, we designed a series of point mutants within the zinc ribbon domain to probe the interaction between Bxb1 and its substrates (10,21). These mutations were focused on a series of alanine and glycine residues in a loop within the zinc ribbon domain (FIG. 61B).

[0751] Mutation in the zinc ribbon domain had variable effects on integration of a DNA cargo by Bxb1. Following transfection of cargo DNA and Bxb1 mRNA into HEK293FT cells with a preplaced attB (here called ‘beacon’), we probed for on-beacon integration using ddPCR (FIG. 61C). Sub-saturating levels of both the DNA cargo and Bxb1 mRNA were used to highlight any differences amongst these Bxb1 variants. Under these conditions, we observed about 20% integration of a DNA cargo with a wild-type Bxb1 construct (FIG. 61D). We assessed the impact of mutations in the zinc ribbon domain to on-beacon integration by engineered Bxbis using the same assay. At certain positions, like A315 and R319, we saw reduced activity for some mutants but retained (or improved) activity for other mutations (FIG. 61D). Some positions, including G316 and G317, did not seem to be amenable to mutation or at least not for the amino acids we tested. Finally, at positions G318 and K320, we found that a range of mutations was tolerated.

[0752] Comprehensive cataloguing of Bxb1 substrate preferences has identified a number of cryptic sites in the human genome that Bxb1 can use as a site for integration (15). Many of the sites results in very low levels of integration but could still be problematic when using Bxb1 in a therapeutic context (7,9,15). In HEK293, the most prominent site of misintegration is a site on chromosome 6, CAS031 (cryptic attachment site 31) (15). We probed the extent to which zinc ribbon Bxb1 mutants can integrate at this site to identify an enzyme that has high on-beacon and reduced off-beacon integration (FIG. 61E).

[0753] Again, mutation in the zinc ribbon domain of Bxb1 had a variable effect on integration into this off-beacon location. Probing for integration at CAS031 using wild-type Bxb1 leads to about 1% integration under these experimental conditions (FIG. 61E). All the engineered Bxb1 constructs were less active on CAS031 than wild-type Bxb1, though some still retained significant activity. However, mutations at A315 appeared to significantly reduce off-beacon activity at CAS031 while retaining on-beacon integration. This is also true for G318 and K320 to glutamic acid and R319 to glutamine.

### 7.25.3.3 Biochemical Characterization of Zinc Ribbon Domain Mutants

[0754] We characterized a series of these mutants biochemically, measuring both binding affinities and specific activities for mutations at A315 and K320. Many mutations did not significantly impact the interaction between Bxb1 and its substrates. However, in many cases any changes we engineered led to modest decreases in the affinity between Bxb1 and attB or attP (FIG. 62A). Interestingly, the mutation of K320 to glutamic acid greatly impacted the interaction. We observed that the affinity of Bxb1 for attB increased by ˜2-fold while the affinity for attP decreased by over 20-fold. Additionally, we observed an additive effect of reduced affinity for attB and attP in the A315R and K320R double mutant.

[0755] We also investigated the impact of mutations in the zinc ribbon domain on Bxb1's offbeacon activity. Here we looked at two different identified sites, CAS031 and CAS421, which is the most frequent off-beacon insertion site in human iPSCs (15). Using two sites allowed us to probe the effect of different mutations more thoroughly.

[0756] All tested mutations in the zinc ribbon domain led to a decrease in binding affinity (increase in KD) relative to wild-type Bxb1 binding to off-beacon sequences. (FIG. 62B). However, some mutations had a more significant effect on one or the other off-beacon sequences. For instance, K320E led to a 2.1-fold weaker KD for CAS031 compared to wildtype Bxb1 and a 4.6-fold weaker KD for CAS421. Conversely, A315R had minimal effect on binding to CAS421 compared to wild-type Bxb1 but led to a 2.3-fold weaker KD for CAS031. The intermediate effect on binding affinity observed in the A315R/K320E double mutant suggests that DNA recognition by Bxb1 is more complex than can be predicted by simple mutations.

[0757] We measured the specific activity for the same series of mutants but did not see any significant differences for many of the constructs (FIG. 62C). Even for K320E, a modest reduction in the specific activity was observed. However, it is likely that under conditions of limiting substrates a more pronounced effect on activity may be seen for K320E. While A315R or K320R mutations led to an increase in activity, no additive effect was observed in the double mutant but rather a decrease in specific activity was detected. Overall, the A315R single mutation led to the greatest increase in activity.

### 7.25.3.4 Naturally Occurring Variants of Bxb1 are as Active as Wild-Type Bxb1 on Bxb1 Substrates

[0758] There are almost 200 sequences deposited in the NCBI database that share 90% sequence similarity to Bxb1. These sequences deviate from Bxb1 at positions through the protein sequence (FIG. 63A). However, they are enriched within the DNA binding domains of Bxb1. In fact, very few positions in the NTD or coiled-coil seem to differ from the canonical Bxb1 sequence. While we have not mapped the native attB or attP sequences for these new LSIs, we decided to assess whether any of these had activity on the original Bxb1 substrates.

[0759] Using a HEK293FT cell line with a pre-installed beacon, we assessed the activity of fifteen naturally occurring Bxb1 variants. These variant proteins had between one and nine differences from wild-type Bxb1, distributed throughout the protein sequence (FIG. 63B). Interestingly, most of the naturally occurring variants, unlike our designed variants, were at least as active, if not more active, than wild-type Bxb1 (FIG. 63C). We observed the biggest differences with mutations clustered in the zinc ribbon domain.

[0760] We also probed these naturally occurring variants for their off-beacon integration activity at CAS031. Unlike the engineered Bxb1 enzymes, most of these variants retained significant off-beacon activity (FIG. 63D). However, variants 12, 13 and 15 showed on beacon activity comparable to wild-type Bxb1 and exhibited low or no activity off-beacon at CAS031. All of these variants contain the same constellation of mutations in the zinc ribbon domain (A315T, H321N, P322A, M329W, F331W, P332A, K333Q, H334R). Variant 13 also contains S293A and variant 15 contains A360S.

[0761] We measured the binding affinity and specific activity for variant 12. We saw very subtle differences in binding affinity for wild-type attB or attP (FIG. 63E). We also measured binding of variant 12 to both CAS031 and CAS421, where we saw a significantly weaker binding affinity to both sequences compared to wild-type Bxb1 (FIG. 63F). We did not see any difference in the specific activity between variant 12 and wild-type Bxb1 (FIG. 63G). However, many of the altered positions between the two proteins would likely mediate interactions between the DNA and the LSI. Additionally, the natural substrates for these variant Bxb1 proteins may be different from those of canonical Bxb1.

### 7.25.3.5 Engineered Bxb1 Variants Improve Bxb1 Activity in Vivo

[0762] For genome engineering efforts, LSIs must be active in vivo. Using transgenic mice that had been generated to carry an attB in their genome, we assessed the activity of engineered Bxb1 variants on hepatocytes in vivo (FIG. 64A). Delivery was facilitated by an IV injection of an LNP carrying the mRNA encoding the LSI and template DNA was delivered by a selfcomplementary AAV8 contain the coding sequence for the human F9 gene. Our early studies found that Bxb1 showed only modest activity in vivo, with wild-type Bxb1 (containing a nuclear localization signal (NLS) and an HA-tag or just an NLS) resulting in only 1-2% integration (FIG. 64B, Bxb1NLS-1, Bxb1 NLS-2). We decided to apply traditional protein engineering efforts to improve this, namely by potentially increasing the stability of the protein through addition of stability tags. An N-terminal fusion with a STABILON tag (derived from the p54/Rpn10 ubiquitin receptor subunit of the Drosophila proteosome) (22) (FIG. 64B, Bxb1 Stabilized-1) increased in vivo potency almost 3-fold. Combining the STABILON tag with a second published sequence, Exin21 (FIG. 64B, Bxb1 Stabilized-2) further increased in vivo potency (23). Combining these two tags on the N-terminus of Bxb1 NLS-1 lead to over 5% gene insertion. Following some other optimizations of components, we were able to achieve 10% insertion with Bxb1 Stabilized-2 (FIG. 64C). Addition of a second STABILON sequence to the C-terminus (Bxb1 Stabilized-3) had a modest effect on the activity of Bxb1 in vivo (FIG. 64D). However, we had also modified the identity of the STABILON tag to the sequence from the human proteasome subunit, which may have led to lower activity overall (22). Returning to the Drosophila STABILON sequence, we altered the sequence N-terminal of the Exin21 tag to remove the HA-tag. Bxb1 Stabilized-4-7 variants all have a series amino acids containing charged or polar residues to act as an alternative to the HA-tag. For most of these we detected an improvement over the original stabilized sequence (Stabilized Bxb1-2) although these proteins also contain an additional STABILON at the C-terminus. For Bxb1 Stabilized-7, the rate of cargo integration is almost double compared to Bxb1 Stabilized-2.

[0763] Finally, we combined our best stabilized versions of Bxb1 with our engineered Bxb1 variants. The most active engineered Bxb1 was A315R and we combined this with two of the stabilized variants of Bxb1. We were able to achieve over 40% cargo integration in bulk liver tissue using Stabilized-A315R-7 (FIG. 64E). From Bxb1 NLS-1 to our final construct, we were able to improve in vivo potency of the integrase by over 25-fold (FIG. 64F).

### 7.25.4. Discussion

[0764] The ability to specifically place a large piece of DNA into a specific location has the potential to revolutionize genetic medicines. It can enable advanced cell engineering, as well as endogenous gene replacement for patients suffering from genetic diseases. Programmable Genomic Integration (PGI) based on LSIs has the potential to efficiently overcome the limitations of previous gene insertion technologies, however LSIs found in nature have challenges associated with potency and specificity. Here we described the development of a suite of novel integrases that could begin to address some of the fundamental issues with the current editing technologies.

[0765] One of the concerns with integrases is a lack of specificity (15). If gene insertion were to occur within a deleterious genomic site (e.g. tumor suppressor), it could lead to an unfavorable safety profile. The tumor suppressor gene would likely now be inactive and could result in development of malignancies. Our group and others have validated at least 50 sites of off-beacon integration by wild-type Bxb1 in mammalian cells, with many more potential sites showing detectable activity in cell-free biochemical assays (7,9,15).

[0766] To address this specificity issue, we have explored two different approaches. First, we used structure-based design to make specific point mutations in the zinc ribbon of Bxb1. Because Bxb1 seems to have fewer sequence-specific contacts in this part of the protein we hypothesized that we would be able to introduce mutations that would increase the stringency of binding to the substrates. We found several positions (notably A315 and K320) where mutation had a small or no effect on Bxb1 on-target activity in HEK293FT cells—leading to similar integration at on-beacon sites and decreased integration at off-beacon sites compared to wild-type Bxb1. These mutants positively impacted DNA binding by Bxb1, leading to proteins with higher affinity for the wild type sequence and lower affinity for the off-target sequences.

[0767] We also analyzed deposited Bxb1-like sequences to find common mutations that may be beneficial to enzyme activity due to their enrichment in these orthologues. We found one constellation of mutations that appeared to be quite beneficial for Bxb1 activity—increasing the level of on-beacon integration in HEK293FT cells while decreasing the level of off-beacon integration to virtually undetectable levels.

[0768] Large serine integrases also suffered from low levels of activity in vivo. Other groups have increased Bxb1's activity using protein evolution schemes to introduce mutations throughout the sequence to achieve efficient integration (7,13). We have used a different method, notably protein tagging with stabilizing sequences. This has led to significant improvements in Bxb1 activity—from less than 2% integration for unstabilized Bxb1 to over 40% in vivo integration for the fully stabilized constructs. This level of integration is now sufficient to be considered for use in therapeutic genome engineering using LSIs.

[0769] Bxb1 has historically been the integrase of choice for genomic engineering efforts (12). Here we have described improvements to Bxb1 to increase specificity and activity that will enable it to continue to lead the field for large serine integrases.

### 7.25.5. Method Details

### 7.25.5.1 Protein Purification

[0770] Bxb1 residues 2-500 and all mutants were cloned into a pET28 expression vector containing a Thioredoxin tag, CL7 affinity tag, 8× His (SEQ ID NO: 751) affinity tag, and SUMO tag (Trialtus Biosciences 20-1022). Protein was expressed in BL21(DE3) E. coli cells (New England Biolabs) grown in Terrific Broth (Teknova T7660) and induced with 1 mM IPTG for 16 hours at 18° C. The resulting cell pellet was resuspended in Ni NTA Buffer A with Halt Protease Inhibitor (Thermo Scientific 78439) and lysed by sonication. Crude lysate was centrifuged at 30,000×g for 30 min and the resulting cleared lysate applied to a 5 mL HisTrap HP column (Cytiva 17-5255-01). The column was washed with Ni NTA Buffer A: 50 mM Tris pH 8.0, 500 mM Sodium Chloride, 25 mM Imidazole, 1 mM DTT and eluted by a gradient with Ni NTA Buffer B: 500 mM Sodium Chloride, 250 mM Imidazole, 1 mM DTT pH 8.0. Following elution Arginine was added to reach a concentration of 200 mM and the protein was cleaved with 50 units of SUMO Protease (Trialtus Biosciences 30-1130) for 16 hours at 4° C. and exchanged into Heparin Buffer A with a HiPrep 26/10 Desalting column (Cytiva 17-5087-01). Cleaved enzyme was bound to a 5 mL HiTrap Heparin HP column (Cytiva 17-0407-03) and washed with Heparin Buffer A: 50 mM Tris pH 8.0, 100 mM Sodium Chloride, 200 mM Arginine, 1 mM TCEP and eluted by gradient elution with Heparin Buffer B: 50 mM Tris pH 8.0, 1 M Sodium Chloride, 200 mM Arginine, 1 mM TCEP. Final polishing was performed using a HiLoad Superdex 200 16/600 column (Cytiva 28-9893-36) and the buffer 50 mM Tris, 500 mM Sodium Chloride, 200 mM Arginine, 1 mM TCEP.

### 7.25.5.2 Biochemical Measurement of Bxb1

[0771] Substrates for biochemical assays were generated using single stranded gBlocks (IDT) designed for each specific target. Gel shift binding assays used a Cy3 or Cy5 fluorophore added to the 3′ end using a fluorescent tagged primer, biochemical activity assays used the same substrates with no fluorophore added.

[0772] Gel shift binding experiments were carried out with 1 nM substrate for KD values above 10 nM and 0.5 nM substrate for KD values below 10 nM. Gel shift binding buffer consisted of 20 mM Tris pH 7.4, 150 mM KCl, 2 mM DTT, 25 mM BSA, 25 mM Salmon Sperm DNA, 5% Glycerol. Enzyme and substrate mixtures were incubated for 30 minutes at 30° C. and separated using 6% Tris-Glycine PAGE gels (Thermo Scientific XP00062BOX). Gels were imaged using a iBright FL1500 gel imager (Thermo Scientific AF44115) and densitometry was performed using iBright Analysis Software (Thermo Scientific).

[0773] Activity assays were carried out with 20 nM of each substrate in a buffer consisting of 25 mM Tris pH 8.0, 100 mM KCl, 50 mM NaCl, 1 mM Spermidine, 5 mM MgCl2, 2.5 mM DTT, 5% Glycerol. Enzyme and substrate mixtures were incubated for 1 hour at 30° C. and reactions were stopped by addition of Proteinase K and incubation at 37° C. for 30 minutes. Samples were visualized using a 4200 Tapestation (Agilent G2991BA) using D1000 DNA Screen Tapes (Agilent, 5067-5582). Area under the curve measurements for the resulting bands were used to calculate the fraction of each substrate/product. Specific activity calculations were performed using the concentration of enzyme where the reaction had proceeded to 20% completeness.

### 7.25.5.3 In Vitro Transcription of mRNA

[0774] All studied genes were cloned into the vector backbone for in vitro transcription (IVT) that contains a single copy of the 5′ UTR and the 3′ UTR from the Xenopus laevis beta globin gene, in addition to a 110 nt polyA tail (SEQ ID NO: 723). Plasmid DNA containing coding sequences were linearized using a BspQI restriction site located immediately downstream of the polyA tail. Linearized plasmids were then purified via AMPure XP magnetic bead (Beckman Coulter A63882).

[0775] All mRNAs were generated via IVT reactions using the T7 RNA polymerase. mRNA was capped cotranscriptionally with CleanCap Reagent AG (TriLink BioTech N-7113-100). Each reaction contained final concentration of ˜50 μg/mL for linearized DNA template, 1× reaction buffer (Hongene Biotech ON-062), 15 mM of MgCl2, 10 units/μL of T7 RNA polymerase (Hongene Biotech ON-004), 0.002 units/μL of yeast inorganic pyrophosphatase (Hongene Biotech ON-025), 1 unit/μL of murine ribonuclease inhibitor (Hongene Biotech ON-039), 5 mM of CleanCap Reagent AG (TriLink BioTech N-7113-100), and 5 mM of each NTP (Jena Bioscience NU-1010, Hongene Biotech R3-056, Hongene Biotech R2-057). In each IVT reaction, UTP was swapped for N1-methylpseudouridine-5′-triphosphate (BOC Sciences 1428903-59-6). IVT reactions were incubated at 37° C. for 2 hours, followed by DNase I digestion of the template DNA (Hongene Biotech ON-109). mRNA products were purified using an RNA Maxi Prep kit (Qiagen), quantified using a NanoDrop (Thermo Fisher Scientific), and checked for integrity using a Fragment Analyzer (Agilent).

### 7.25.5.4 Generation of attB+HEK293FT Cell Line

[0776] In-house produced lentivirus containing a transfer plasmid with an EFlα-PuroR-WPRE backbone carrying a 46 bp Bxb1 attB insert was transduced into HEK293FT cells (Thermo Fisher Scientific R70007). Cells with Low MOI were plated in sterile 96-well tissue culture plates under puromycin selection via serial dilutions for clone selection. After clone selection, single lentiviral insertion on chromosome 5 was confirmed using ligation mediated PCR with primers targeting the 5′ and 3′ LTRs along with Cergentis TLA mapping (data not shown).

### 7.25.5.5 General Cell Culture Conditions

[0777] The attB+HEK293FT cells were cultured in DMEM (Corning 10-013-CV) with 10% FBS (Gibco A3160501) and 1 μg/mL puromycin under standard tissue culture conditions (at 37° C. and 5% CO2).

[0778] Cells were detached for splitting and plating using TrypLE Express (Thermo Fisher Scientific 12604039) according to the manufacturer's instructions.

### 7.25.5.6 Transfection Conditions

[0779] To transfect cells with plasmids and mRNAs, Lipofectamine MessengerMax (Thermofisher LMRNA001) was used as transfection reagent. 1 d before transfection, cells were seeded onto 96-well tissue culture plates at a density of 21,000 cells per well. For the on-beacon integration assay, 30 ng of Bxb1 variant mRNA and 3.5 ng of cargo plasmid were mixed with 0.3 uL of LipofectamineMessengerMax and co-transfected into cells plated in a single well. For the off-beacon integration assay, 100 ng of Bxb1 variant mRNA and 60 ng of cargo plasmid were mixed with 0.3 uL of Lipofectamine MessengerMax and co-transfected into cells plated in a single well.

### 7.25.5.7 Genomic DNA Extraction

[0780] Genomic DNA (gDNA) was extracted 3 d after transfection by removing medium, resuspending cells in 50 uL QuickExtract (LGC Biosearch Technologies QE0905T), and incubating at 75° C. for 10 min followed by 95° C. for 5 min. Then gDNA was purified from cell lysates by AMPure XP magnetic bead (Beckman Coulter A63882).

### 7.25.5.8 Droplet Digital Polymerase Chain Reaction (ddPCR)

[0781] Custom primers and probes were designed to measure editing in the studied loci. Probes were dual labelled with 3′-3IABkFQ and either 5′-carboxyflurescein (FAM) for edit targets or 5′-hexachlorofluorescein phosphoramidite (HEX) for reference genes. From each sample, ddPCR signals from the edit target assay and reference assay were collected together. Percent integration was calculated by dividing the number of FAM-positive droplets (indicating successful cargo integration) by the total number of HEX-positive droplets (reference gene) and then converting the values to a percentage. Assays were validated using gBlocks representing edit outcomes to test for both specificity and linearity. All primers, probes, and gBlocks were synthesized by Integrated DNA Technologies (IDT).

[0782] Each reaction contained 11 μL of 2× ddPCR Supermix for probes (No dUTP) (Bio-Rad 1863025), final concentration of 0.5 μM for each primer and 0.25 μM for each probe, 0.11 μL each of HindIII and Eco91I (Thermo Fisher Scientific FD0504 and FD0394, respectively) ˜100 ng of gDNA and water to a final volume of 22 μL. Droplets were generated on the AutoDG Instrument for automated droplet generation (Bio-Rad 1864101). PCR amplification was performed with the following cycling parameters: initial enzyme activation at 94° C. for 10 min, followed by 40 cycles of denaturation at 94° C. for 30 s and combined annealing/extension step at 58° C. for 1 min, and a final step at 98° C. for 5 min. Data acquisition and analysis were performed on the QX200 Droplet Reader (Bio-rad 1864003).

### 7.25.5.9 In Vivo Mouse Studies

[0783] All animal study procedures were approved by Explora BioLabs under IACUC protocol EB17-004-302. Transgenic C57BL/6J mice with a knock-in of the attB site in intron 1 of F9 or Rosa26 were generated by Biocytogen (Beijing, China) using CRISPR/Cas9. Mice were transferred to Biomere (Worcester, MA, USA) for breeding. AAV8 (AAVG107) cargo was intravenously injected into adult mice (-20-46 weeks) at a dose of 2E13 or 2.5E13 at day zero. At day seven, LNPs formulated with corresponding Bxb1 variant mRNAs were intravenously injected into the mice at a dose of 3 mg/kg. On day fourteen post LNP injection, animals were euthanized, and liver tissue was collected from the median lobe from each animal and homogenized on Precellys Evolution (cat K002198-PEVOO-A.0 Combo, Bertin technologies, WA, USA).

### 7.25.5.10 Liver gDNA Isolation and Analysis

[0784] Liver gDNA was extracted with quick-DNA/RNA MagBead kit (cat R2131, Zymo research, CA, USA) and analyzed by ddPCR using BioRad Automated Droplet Generator (cat 1864101) and BioRad QX200 Droplet Reader (cat 1864003). Approximately 30 ng of input gDNA were loaded into all ddPCR reactions. Restriction enzymes Eco911 and HindIII were added at [1:200] dilution to ddPCR master mixes. I-PGI attL and attR analyses were performed using the following ddPCR primer-probes: mF9 attB (attL: Fwd primer (5′-GGAGTCCAACCTTAAGTCTCTTG-3′(SEQ ID NO: 706)), Rev primer (5′-GGTTCAGGATCTTGTTGGCG-3′ (SEQ ID NO: 707)), probe (5′-FAM CTTGTCGACGACGGCGGTCTCAGTG-3′(SEQ ID NO: 697)); attR: Fwd primer (5′-GCAACTTGGGCTACCAGAT-3′(SEQ ID NO: 708)), Rev primer (5′-GCTGTTTTGTTTCCACTGTGTAC-3′(SEQ ID NO: 709)), probe (5′-FAM CGGTCTCCGTCGTCAGGATCAT-3′(SEQ ID NO: 710)), Rosa26 attB: (attL: Fwd primer (5′-AGTATACCAGCTAGCAGGCC-3′(SEQ ID NO: 711)), Rev primer (5′-GGTTCAGGATCTTGTTGGCG-3′(SEQ ID NO: 707)), probe(5′-FAM CTTGTCGACGACGGCGGTCTCAGTG-3′(SEQ ID: 697)); attR: Fwd primer (5′-GCAACTTGGGCTACCAGAT-3′(SEQ ID NO: 708)), Rev primer (5′-GCAGAGAACTCCCAGAAAGGT-3′(SEQ ID NO: 712)), probe (5′-FAM CGGTCTCCGTCGTCAGGATCAT-3′ (SEQ ID NO: 710)). mTfrc probe (Applied Biosciences cat 4458370) was used as reference.

### 7.25.6. Materials

[0785] Table 27 below, related to FIGS. 60B-60E, 62A-62C, 63E-63G DNA substrates for biochemical assays.

TABLE 27

| | | SEQ |
|---|---|---|
| | | ID |
| Name | Sequence | Nos |
| Bxb1 attB | CGAGTGGTGCGACGTCTGGCTTTCGGTGCCCTAGTGATGAGAAATATG | 679 |
| 180 bp | TATTTCGTTCTTGCAGCTTGTCAGTACTTTCAGAATCATGGTCTGCATG | |
| | GTAGAATGGCCGGCTTGTCGACGACGGCGGTCTCCGTCGTCAGGATCA | |
| | TCCGGTCGCTATCTAGCGAGTTCGCGCGCTCTGTG | |
| Bxb1 attP | GTGTAGCGTCGCTACGCGCCATTGTCAGCACAAGAtgGGTTTGTCTGGT | 680 |
| 220 bp | CAACCACCGCGGTCTCAGTGGTGTACGGTACAAACCacCATGAAGGCTA | |
| | GAATTACTTACCGGCCTTTACCATGCCTGCACTATACGCACCTACTTTC | |
| | CCGTTTATCTGTCCAAGCAGATACAATGCGATCCTCCGTTAAGATATTC | |
| | TTACGTGCGACGTCGCCGTGGATG | |
| Bxb1 attL | CGAGTGGTGCGACGTCTGGCTTTCGGTGCCCTAGTGATGAGAAATATG | 681 |
| 286 bp | TATTTCGTTCTTGCAGCTTGTCAGTACTTTCAGAATCATGGTCTGCATG | |
| | GTAGAATGGCCGGCTTGTCGACGACGGCGGTCTCAGTGGTGTACGGTA | |
| | CAAACCCACATGAAGGCTAGAATTACTTACCGGCCTTTACCATGCCTG | |
| | CACTATACGCACCTACTTTCCCGTTTATCTGTCCAAGCAGATACAATGC | |
| | GATCCTCCGTTAAGATATTCTTACGTGCGACGTCGCCGTGGATG | |
| Bxb1 attR | GTGTAGCGTCGCTACGCGCCATTGTCAGCACAAGAGTGGTTTGTCTGG | 682 |
| 115 bp | TCAACCACCGCGGTCTCCGTCGTCAGGATCATCCGGTCGCTATCTAGC | |
| | GAGTTCGCGCGCTCTGTG | |
| Bxb1 | CGAGTGGTGCGACGTCTGGCTTTCGGTGCCCTAGTGATGAGAAATATG | 683 |
| CAS031 | TATTTCGTTCTTGCAGCTTGTCAGTACTTTCAGAATCATGGTCTGCATG | |
| | GTAGAATAAGCACGACCTCCACAACAGAGGTTGCTGTTGTGGAGGTTG | |
| | CTCAATCGCTATCTAGTTGAGTAAGAGCTGGCGAGTTCGCGCGCTCTGT | |
| | G | |
| Bxb1 | CGAGTGGTGCGACGTCTGGCTTTCGGTGCCCTAGTGATGAGAAATATG | 684 |
| CAS421 | TATTTCGTTCTTGCAGCTTGTCAGTACTTTCAGAATCATGGTCTGCATG | |
| | GTAGAATGTTTGGTTTGTTTGCAACGGCAGTGACGGAGGTTGGGAGCC | |
| | AGGCTTCGCTATCTAGTTGAGTAAGAGCTGGCGAGTTCGCGCGCTCTG | |
| | TG | |
| Bxb1 | CGAGTGGTGCGACGTCTGGCTTTCGGTGCCCTAGTGATGAGAAATATG | 685 |
| attB_40 bp | TATTTCGTTCTTGCAGCTTGTCAGTACTTTCAGAATCATGGTCTGCATG | |
| 180 bp | GTAGAATttaCGGCTTGTCGACGACGGCGGTCTCCGTCGTCAGGATCATC | |
| | attTCGCTATCTAGCGAGTTCGCGCGCTCTGTG | |
| Bxb1 | CGAGTGGTGCGACGTCTGGCTTTCGGTGCCCTAGTGATGAGAAATATG | 686 |
| attB_38 bp | TATTTCGTTCTTGCAGCTTGTCAGTACTTTCAGAATCATGGTCTGCATG | |
| 180 bp | GTAGAATttaaGGCTTGTCGACGACGGCGGTCTCCGTCGTCAGGATCATaa | |
| | ttTCGCTATCTAGCGAGTTCGCGCGCTCTGTG | |
| Bxb1 | CGAGTGGTGCGACGTCTGGCTTTCGGTGCCCTAGTGATGAGAAATATG | 687 |
| attB_36 bp | TATTTCGTTCTTGCAGCTTGTCAGTACTTTCAGAATCATGGTCTGCATG | |
| 180 bp | GTAGAATttaatGCTTGTCGACGACGGCGGTCTCCGTCGTCAGGATCAgaatt | |
| | TCGCTATCTAGCGAGTTCGCGCGCTCTGTG | |
| Bxb1 | CGAGTGGTGCGACGTCTGGCTTTCGGTGCCCTAGTGATGAGAAATATG | 688 |
| attB_34 bp | TATTTCGTTCTTGCAGCTTGTCAGTACTTTCAGAATCATGGTCTGCATG | |
| 180 bp | GTAGAATttaattCTTGTCGACGACGGCGGTCTCCGTCGTCAGGATCcgaattT | |
| | CGCTATCTAGCGAGTTCGCGCGCTCTGTG | |
| Bxb1 | CGAGTGGTGCGACGTCTGGCTTTCGGTGCCCTAGTGATGAGAAATAGT | 689 |
| attB_32 bp | ATTTCGTTCTTGCAGCTTGTCAGTACTTTCAGAATCATGGTCTGCATGG | |
| 180 bp | TAGAATttaattaTTGTCGACGACGGCGGTCTCCGTCGTCAGGATacgaattTCG | |
| | CTATCTAGCGAGTTCGCGCGCTCTGTG | |
| Bxb1 | CGAGTGGTGCGACGTCTGGCTTTCGGTGCCCTAGTGATGAGAAATATG | 690 |
| attB_30 bp | TATTTCGTTCTTGCAGCTTGTCAGTACTTTCAGAATCATGGTCTGCATG | |
| 180 bp | GTAGAATttaattagTGTCGACGACGGCGGTCTCCGTCGTCAGGAgacgaattTC | |
| | GCTATCTAGCGAGTTCGCGCGCTCTGTG | |
| attB 5′ F | CGAGTGGTGCGACGTCTGGCattB 3′ R | 691 |
| attB 3′ R | GCGAGTTCGCGCGCTCTGTG | 692 |
| attP 5′ F | GTGTAGCGTCGCTACGCGCC | 693 |
| attP 3′ R | CATCCACGGCGACGTCGCAC | 694 |

[0786] Table 28 below, related to FIGS. 61C-61D, 63C-63D. DNA primers and probes for in vitro ddPCR assay.

TABLE 28

| | | SEQ |
|---|---|---|
| | Sequence (5′→3′) | ID Nos. |
| On-beacon, | TACCATCCACTCGACA | 695 |
| target forward | CACC | |
| On- & Off-beacon, | GAACTCCACGCCGTTC | 696 |
| target reverse | A | |
| On-beacon, | CTTGTCGACGACGGCG | 697 |
| target probe | GTCTCAGTG | |
| On-beacon, | GCTTTGTTCCTTGGGT | 698 |
| reference forward | TCTTG | |
| On-beacon, | TTCTGCTGCTGCACTA | 699 |
| reference reverse | TACC | |
| On-beacon, | AATTGTCTGGCCTGTA | 700 |
| reference probe | CCGTCAGC | |
| Off-beacon, | GTAAGAGCCTGGCTTA | 701 |
| target forward | ATGAGC | |
| Off-beacon, | CCTCCACAACAGAGGT | 702 |
| target probe | CTCAGTGGTGTACG | |
| Off-beacon, | GTGATGTTGTAAGTTT | 703 |
| reference forward | TCCACAGC | |
| Off-beacon, | GGAGCTTAGCAATCTC | 704 |
| reference reverse | TCTGATTT | |
| Off-beacon, | AGACTTCCCTTTCTTC | 705 |
| reference probe | TGCCACTGCCAC | |

[0787] Table 29 below, related to FIG. 63C. Protein mutations of studied Bxb1 variants

TABLE 29

| | |
|---|---|
| Bxb1 (WT) | Bxb1 Stabilized-1 |
| Bxb1 Variant 1 | Q27R |
| Bxb1 Variant 2 | D36E |
| Bxb1 Variant 3 | Q219K, M239L |
| Bxb1 Variant 4 | Q219K, M239L, S286D |
| Bxb1 Variant 5 | Q219K, M239L, S286D, A288T |
| Bxb1 Variant 6 | Q219K, M239L, A266S, S286D, A288T |
| Bxb1 Variant 7 | S293A |
| Bxb1 Variant 8 | A360S |
| Bxb1 Variant 9 | A398V |
| Bxb1 Variant 10 | A449S, A450G |
| Bxb1 Variant 11 | A449S, R494Q, T497A |
| Bxb1 Variant 12 | A315T, H321N, P322A, M329W, F331W, |
| | P332A, K333Q, H334R |
| Bxb1 Variant 13 | A315T, H321N, P322A, M329W, F331W, |
| | P332A, K333Q, H334R, S293A |
| Bxb1 Variant 14 | A315T, H321N, P322A, M329W, F331W, |
| | P332A, K333Q, H334R, K320E |
| Bxb1 Variant 15 | A315T, H321N, P322A, M329W, F331W, |
| | P332A, K333Q, H334R, A360S |

[0788] Table 30 below, related to FIG. 64B. Protein sequences for stabilized variants

TABLE 30

| | | |
|---|---|---|
| Bxb1 | MPKKKRKVYPYDVPDYAGSRALVVIRLSRVTDATTSPERQLESCQQLCAQR | SEQ ID |
| NLS-1 | GWDVVGVAEDLDVSGAVDPFDRKRRPNLARWLAFEEQPFDVIVAYRVDRL | NO: 713 |
| | TRSIRHLQQLVHWAEDHKKLVVSATEAHFDTTTPFAAVVIALMGTVAQMEL | |
| | EAIKERNRSAAHFNIRAGKYRGSLPPWGYLPTRVDGEWRLVPDPVQRERILE | |
| | VYHRVVDNHEPLHLVAHDLNRRGVLSPKDYFAQLQGREPQGREWSATALK | |
| | RSMISEAMLGYATLNGKTVRDDDGAPLVRAEPILTREQLEALRAELVKTSRA | |
| | KPAVSTPSLLLRVLFCAVCGEPAYKFAGGGRKHPRYRCRSMGFPKHCGNGT | |
| | VAMAEWDAFCEEQVLDLLGDAERLEKVWVAGSDSAVELAEVNAELVDLTS | |
| | LIGSPAYRAGSPQREALDARIAALAARQEELEGLEARPSGWEWRETGQRFGD | |
| | WWREQDTAAKNTWLRSMNVRLTFDVRGGLTRTIDFGDLQEYEQHLRLGSV | |
| | VERLHTGMS* | |
| Bxb1 | MPKKKRKVGSGRALVVIRLSRVTDATTSPERQLESCQQLCAQRGWDVVGVA | SEQ ID |
| NLS-2 | EDLDVSGAVDPFDRKRRPNLARWLAFEEQPFDVIVAYRVDRLTRSIRHLQQL | NO: 714 |
| | VHWAEDHKKLVVSATEAHFDTTTPFAAVVIALMGTVAQMELEAIKERNRSA | |
| | AHFNIRAGKYRGSLPPWGYLPTRVDGEWRLVPDPVQRERILEVYHRVVDNH | |
| | EPLHLVAHDLNRRGVLSPKDYFAQLQGREPQGREWSATALKRSMISEAMLG | |
| | YATLNGKTVRDDDGAPLVRAEPILTREQLEALRAELVKTSRAKPAVSTPSLLL | |
| | RVLFCAVCGEPAYKFAGGGRKHPRYRCRSMGFPKHCGNGTVAMAEWDAFC | |
| | EEQVLDLLGDAERLEKVWVAGSDSAVELAEVNAELVDLTSLIGSPAYRAGSP | |
| | QREALDARIAALAARQEELEGLEARPSGWEWRETGQRFGDWWREQDTAAK | |
| | NTWLRSMNVRLTFDVRGGLTRTIDFGDLQEYEQHLRLGSVVERLHTGMS* | |
| Bxb1 | MPKKKRKVYPYDVPDYAKDKKSDGKDSQKKGSRALVVIRLSRVTDATTSPE | SEQ ID |
| Stabi- | RQLESCQQLCAQRGWDVVGVAEDLDVSGAVDPFDRKRRPNLARWLAFEEQ | NO: 621 |
| lized-1 | PFDVIVAYRVDRLTRSIRHLQQLVHWAEDHKKLVVSATEAHFDTTTPFAAVV | |
| | IALMGTVAQMELEAIKERNRSAAHFNIRAGKYRGSLPPWGYLPTRVDGEWR | |
| | LVPDPVQRERILEVYHRVVDNHEPLHLVAHDLNRRGVLSPKDYFAQLQGREP | |
| | QGREWSATALKRSMISEAMLGYATLNGKTVRDDDGAPLVRAEPILTREQLE | |
| | ALRAELVKTSRAKPAVSTPSLLLRVLFCAVCGEPAYKFAGGGRKHPRYRCRS | |
| | MGFPKHCGNGTVAMAEWDAFCEEQVLDLLGDAERLEKVWVAGSDSAVEL | |
| | AEVNAELVDLTSLIGSPAYRAGSPQREALDARIAALAARQEELEGLEARPSG | |
| | WEWRETGQRFGDWWREQDTAAKNTWLRSMNVRLTFDVRGGLTRTIDFGD | |
| | LQEYEQHLRLGSVVERLHTGMS* | |
| Bxb1 | MPKKKRKVQPRFAAAGSGKDKKSDGKDSQKKGSGRALVVIRLSRVTDATTS | SEQ ID |
| Stabi- | PERQLESCQQLCAQRGWDVVGVAEDLDVSGAVDPFDRKRRPNLARWLAFE | NO: 625 |
| lized-2 | EQPFDVIVAYRVDRLTRSIRHLQQLVHWAEDHKKLVVSATEAHFDTTTPFAA | |
| | VVIALMGTVAQMELEAIKERNRSAAHFNIRAGKYRGSLPPWGYLPTRVDGE | |
| | WRLVPDPVQRERILEVYHRVVDNHEPLHLVAHDLNRRGVLSPKDYFAQLQG | |
| | REPQGREWSATALKRSMISEAMLGYATLNGKTVRDDDGAPLVRAEPILTREQ | |
| | LEALRAELVKTSRAKPAVSTPSLLLRVLFCAVCGEPAYKFAGGGRKHPRYRC | |
| | RSMGFPKHCGNGTVAMAEWDAFCEEQVLDLLGDAERLEKVWVAGSDSAVE | |
| | LAEVNAELVDLTSLIGSPAYRAGSPQREALDARIAALAARQEELEGLEARPSG | |
| | WEWRETGQRFGDWWREQDTAAKNTWLRSMNVRLTFDVRGGLTRTIDFGD | |
| | LQEYEQHLRLGSVVERLHTGMS* | |
| Bxb1 | MPKKKRKVYPYDVPDYAQPRFAAAGSGKDGKKDKKEEDKKGSRALVVIRL | SEQ ID |
| Stabi- | SRVTDATTSPERQLESCQQLCAQRGWDVVGVAEDLDVSGAVDPFDRKRRPN | NO: 663 |
| lized-3 | LARWLAFEEQPFDVIVAYRVDRLTRSIRHLQQLVHWAEDHKKLVVSATEAH | |
| | FDTTTPFAAVVIALMGTVAQMELEAIKERNRSAAHFNIRAGKYRGSLPPWGY | |
| | LPTRVDGEWRLVPDPVQRERILEVYHRVVDNHEPLHLVAHDLNRRGVLSPK | |
| | DYFAQLQGREPQGREWSATALKRSMISEAMLGYATLNGKTVRDDDGAPLV | |
| | RAEPILTREQLEALRAELVKTSRAKPAVSTPSLLLRVLFCAVCGEPAYKFAGG | |
| | GRKHPRYRCRSMGFPKHCGNGTVAMAEWDAFCEEQVLDLLGDAERLEKV | |
| | WVAGSDSAVELAEVNAELVDLTSLIGSPAYRAGSPQREALDARIAALAARQE | |
| | ELEGLEARPSGWEWRETGQRFGDWWREQDTAAKNTWLRSMNVRLTFDVR | |
| | GGLTRTIDFGDLQEYEQHLRLGSVVERLHTGMSGSGKDGKKDKKEEDKK* | |
| Bxb1 | MPKKKRKVAYDPVDYPYQPRFAAAGSGKDKKSDGKDSQKKGSRALVVIRL | SEQ ID |
| Stabi- | SRVTDATTSPERQLESCQQLCAQRGWDVVGVAEDLDVSGAVDPFDRKRRPN | NO: 715 |
| lized-4 | LARWLAFEEQPFDVIVAYRVDRLTRSIRHLQQLVHWAEDHKKLVVSATEAH | |
| | FDTTTPFAAVVIALMGTVAQMELEAIKERNRSAAHFNIRAGKYRGSLPPWGY | |
| | LPTRVDGEWRLVPDPVQRERILEVYHRVVDNHEPLHLVAHDLNRRGVLSPK | |
| | DYFAQLQGREPQGREWSATALKRSMISEAMLGYATLNGKTVRDDDGAPLV | |
| | RAEPILTREQLEALRAELVKTSRAKPAVSTPSLLLRVLFCAVCGEPAYKFAGG | |
| | GRKHPRYRCRSMGFPKHCGNGTVAMAEWDAFCEEQVLDLLGDAERLEKV | |
| | WVAGSDSAVELAEVNAELVDLTSLIGSPAYRAGSPQREALDARIAALAARQE | |
| | ELEGLEARPSGWEWRETGQRFGDWWREQDTAAKNTWLRSMNVRLTFDVR | |
| | GGLTRTIDFGDLQEYEQHLRLGSVVERLHTGMSGSGKDKKSDGKDSQKK* | |
| Bxb1 | MPKKKRKVYPYELPEYGQPRFAAAGSGKDKKSDGKDSQKKGSRALVVIRLS | SEQ ID |
| Stabi- | RVTDATTSPERQLESCQQLCAQRGWDVVGVAEDLDVSGAVDPFDRKRRPNL | NO: 716 |
| lized-5 | ARWLAFEEQPFDVIVAYRVDRLTRSIRHLQQLVHWAEDHKKLVVSATEAHF | |
| | DTTTPFAAVVIALMGTVAQMELEAIKERNRSAAHFNIRAGKYRGSLPPWGYL | |
| | PTRVDGEWRLVPDPVQRERILEVYHRVVDNHEPLHLVAHDLNRRGVLSPKD | |
| | YFAQLQGREPQGREWSATALKRSMISEAMLGYATLNGKTVRDDDGAPLVR | |
| | AEPILTREQLEALRAELVKTSRAKPAVSTPSLLLRVLFCAVCGEPAYKFAGGG | |
| | RKHPRYRCRSMGFPKHCGNGTVAMAEWDAFCEEQVLDLLGDAERLEKVW | |
| | VAGSDSAVELAEVNAELVDLTSLIGSPAYRAGSPQREALDARIAALAARQEE | |
| | LEGLEARPSGWEWRETGQRFGDWWREQDTAAKNTWLRSMNVRLTFDVRG | |
| | GLTRTIDFGDLQEYEQHLRLGSVVERLHTGMSGSGKDKKSDGKDSQKK* | |
| Bxb1 | MPKKKRKVGGGGSGGGGSQPRFAAAGSGKDKKSDGKDSQKKGSRALVVIR | SEQ ID |
| Stabi- | LSRVTDATTSPERQLESCQQLCAQRGWDVVGVAEDLDVSGAVDPFDRKRRP | NO: 717 |
| lized-6 | NLARWLAFEEQPFDVIVAYRVDRLTRSIRHLQQLVHWAEDHKKLVVSATEA | |
| | HFDTTTPFAAVVIALMGTVAQMELEAIKERNRSAAHFNIRAGKYRGSLPPWG | |
| | YLPTRVDGEWRLVPDPVQRERILEVYHRVVDNHEPLHLVAHDLNRRGVLSP | |
| | KDYFAQLQGREPQGREWSATALKRSMISEAMLGYATLNGKTVRDDDGAPL | |
| | VRAEPILTREQLEALRAELVKTSRAKPAVSTPSLLLRVLFCAVCGEPAYKFAG | |
| | GGRKHPRYRCRSMGFPKHCGNGTVAMAEWDAFCEEQVLDLLGDAERLEKV | |
| | WVAGSDSAVELAEVNAELVDLTSLIGSPAYRAGSPQREALDARIAALAARQE | |
| | ELEGLEARPSGWEWRETGQRFGDWWREQDTAAKNTWLRSMNVRLTFDVR | |
| | GGLTRTIDFGDLQEYEQHLRLGSVVERLHTGMSGSGKDKKSDGKDSQKK* | |
| Bxb1 | MPKKKRKVQFELADPYTQPRFAAAGSGKDKKSDGKDSQKKGSRALVVIRLS | SEQ ID |
| Stabi- | RVTDATTSPERQLESCQQLCAQRGWDVVGVAEDLDVSGAVDPFDRKRRPNL | NO: 718 |
| lized-7 | ARWLAFEEQPFDVIVAYRVDRLTRSIRHLQQLVHWAEDHKKLVVSATEAHF | |
| | DTTTPFAAVVIALMGTVAQMELEAIKERNRSAAHFNIRAGKYRGSLPPWGYL | |
| | PTRVDGEWRLVPDPVQRERILEVYHRVVDNHEPLHLVAHDLNRRGVLSPKD | |
| | YFAQLQGREPQGREWSATALKRSMISEAMLGYATLNGKTVRDDDGAPLVR | |
| | AEPILTREQLEALRAELVKTSRAKPAVSTPSLLLRVLFCAVCGEPAYKFAGGG | |
| | RKHPRYRCRSMGFPKHCGNGTVAMAEWDAFCEEQVLDLLGDAERLEKVW | |
| | VAGSDSAVELAEVNAELVDLTSLIGSPAYRAGSPQREALDARIAALAARQEE | |
| | LEGLEARPSGWEWRETGQRFGDWWREQDTAAKNTWLRSMNVRLTFDVRG | |
| | GLTRTIDFGDLQEYEQHLRLGSVVERLHTGMSGSGKDKKSDGKDSQKK* | |
| A315R | MPKKKRKVGGGGSGGGGSQPRFAAAGSGKDKKSDGKDSQKKGSRALVVIR | SEQ ID |
| Stabi- | LSRVTDATTSPERQLESCQQLCAQRGWDVVGVAEDLDVSGAVDPFDRKRRP | NO: 719 |
| lized-6 | NLARWLAFEEQPFDVIVAYRVDRLTRSIRHLQQLVHWAEDHKKLVVSATEA | |
| | HFDTTTPFAAVVIALMGTVAQMELEAIKERNRSAAHFNIRAGKYRGSLPPWG | |
| | YLPTRVDGEWRLVPDPVQRERILEVYHRVVDNHEPLHLVAHDLNRRGVLSP | |
| | KDYFAQLQGREPQGREWSATALKRSMISEAMLGYATLNGKTVRDDDGAPL | |
| | VRAEPILTREQLEALRAELVKTSRAKPAVSTPSLLLRVLFCAVCGEPAYKFRG | |
| | GGRKHPRYRCRSMGFPKHCGNGTVAMAEWDAFCEEQVLDLLGDAERLEKV | |
| | WVAGSDSAVELAEVNAELVDLTSLIGSPAYRAGSPQREALDARIAALAARQE | |
| | ELEGLEARPSGWEWRETGQRFGDWWREQDTAAKNTWLRSMNVRLTFDVR | |
| | GGLTRTIDFGDLQEYEQHLRLGSVVERLHTGMSGSGKDKKSDGKDSQKK* | |
| A315R | MPKKKRKVQFELADPYTQPRFAAAGSGKDKKSDGKDSQKKGSRALVVIRLS | SEQ ID |
| Stabi- | RVTDATTSPERQLESCQQLCAQRGWDVVGVAEDLDVSGAVDPFDRKRRPNL | NO: 720 |
| lized-7 | ARWLAFEEQPFDVIVAYRVDRLTRSIRHLQQLVHWAEDHKKLVVSATEAHF | |
| | DTTTPFAAVVIALMGTVAQMELEAIKERNRSAAHFNIRAGKYRGSLPPWGYL | |
| | PTRVDGEWRLVPDPVQRERILEVYHRVVDNHEPLHLVAHDLNRRGVLSPKD | |
| | YFAQLQGREPQGREWSATALKRSMISEAMLGYATLNGKTVRDDDGAPLVR | |
| | AEPILTREQLEALRAELVKTSRAKPAVSTPSLLLRVLFCAVCGEPAYKFRGGG | |
| | RKHPRYRCRSMGFPKHCGNGTVAMAEWDAFCEEQVLDLLGDAERLEKVW | |
| | VAGSDSAVELAEVNAELVDLTSLIGSPAYRAGSPQREALDARIAALAARQEE | |
| | LEGLEARPSGWEWRETGQRFGDWWREQDTAAKNTWLRSMNVRLTFDVRG | |
| | GLTRTIDFGDLQEYEQHLRLGSVVERLHTGMSGSGKDKKSDGKDSQKK* | |

[0789] Table 31 below, related to FIGS. 64C-64E. DNA primers and probes for in vivo ddPCR assay.

TABLE 31

| | | SEQ |
|---|---|---|
| Name | Sequence | ID Nos. |
| mF9 attB attL | GGAGTCCAACCTTAAGTCTC | 706 |
| FWD primer | TTG | |
| mF9 attB attL | GGTTCAGGATCTTGTTGGCG | 707 |
| REV primer | | |
| mF9 attB attL | FAM-CTTGTCGACGACGGCG | 697 |
| probe | GTCTCAGTG | |
| mF9 attB attR | GCAACTTGGGCTACCAGAT | 708 |
| FWD primer | | |
| mF9 attB attR | GCTGTTTTGTTTCCACTGTG | 709 |
| REV primer | TAC | |
| mF9 attB attR | FAM-CGGTCTCCGTCGTCAG | 710 |
| probe | GATCAT | |
| Roas26 attB attL | AGTATACCAGCTAGCAGGCC | 711 |
| FWD primer | | |
| Rosa26 attB attL | GGTTCAGGATCTTGTTGGCG | 707 |
| REV primer | | |
| Rosa26 attB attL | FAM-CTTGTCGACGACGGC | 697 |
| probe | GGTCTCAGTG | |
| Rosa26 attB attR | GCAACTTGGGCTACCAGAT | 708 |
| FWD primer | | |
| Rosa26 attB attR | GCAGAGAACTCCCAGAAAG | 712 |
| REV primer | GT | |
| Rosa26 attB attR | FAM-CGGTCTCCGTCGTCA | 710 |
| probe | GGATCAT | |
| mTfrc probe | Applied Biosciences | |
| | cat 4458370 | |

### 7.25.7. References

[0790] 1. Smith, M. C. M. (2015) Phage-encoded Serine Integrases and Other Large SerineRecombinases. Microbiol Spectr, 3.
[0791] 2. Matreyek, K. A., Stephany, J. J. and Fowler, D. M. (2017) A platform for functional assessment of large variant libraries in mammalian cells. Nucleic Acids Res, 45, e102.
[0792] 3. Blanch-Asensio, A., Grandela, C., Brandao, K. O., de Korte, T., Mei, H., Ariyurek, Y., Yiangou, L., Mol, M. P. H., van Meer, B. J., Kloet, S. L. et al. (2022) STRAIGHT-IN enables high-throughput targeting of large DNA payloads in human pluripotent stem cells. Cell Rep Methods, 2, 100300.
[0793] 4. Low, B. E., Hosur, V., Lesbirel, S. and Wiles, M. V. (2022) Efficient targeted transgenesis of large donor DNA into multiple mouse genetic backgrounds using bacteriophage Bxb1 integrase. Sci Rep, 12, 5424.
[0794] 5. Zhu, F., Gamboa, M., Farruggio, A. P., Hippenmeyer, S., Tasic, B., Schule, B., Chen-Tsai, Y. and Calos, M. P. (2014) DICE, an efficient system for iterative genomic editing in human pluripotent stem cells. Nucleic Acids Res, 42, e34.
[0795] 6. Yarnall, M. T. N., Ioannidi, E. I., Schmitt-Ulms, C., Krajeski, R. N., Lim, J., Villiger, L., Zhou, W., Jiang, K., Garushyants, S. K., Roberts, N. et al. (2023) Drag-and-drop genome insertion of large sequences without double-strand DNA cleavage using CRISPR-directed integrases. Nat Biotechnol, 41, 500-512.
[0796] 7. Pandey, S., Gao, X. D., Krasnow, N. A., McElroy, A., Tao, Y. A., Duby, J. E., Steinbeck, B. J., McCreary, J., Pierce, S. E., Tolar, J. et al. (2024) Efficient site-specific integration of large genes in mammalian cells via continuously evolved recombinases and prime editing. Nat Biomed Eng.
[0797] 8. Anzalone, A. V., Gao, X. D., Podracky, C. J., Nelson, A. T., Koblan, L. W., Raguram, A., Levy, J. M., Mercer, J. A. M. and Liu, D. R. (2022) Programmable deletion, replacement, integration and inversion of large DNA sequences with twin prime editing. Nat Biotechnol, 40, 731-740.
[0798] 9. Durrant, M. G., Fanton, A., Tycko, J., Hinks, M., Chandrasekaran, S. S., Perry, N. T., Schaepe, J., Du, P. P., Lotfy, P., Bassik, M. C. et al. (2023) Systematic discovery of recombinases for efficient integration of large DNA sequences into the human genome. Nat Biotechnol, 41, 488-499.
[0799] 10. Rutherford, K., Yuan, P., Perry, K., Sharp, R. and Van Duyne, G. D. (2013) Attachment site recognition and regulation of directionality by the serine integrases. Nucleic Acids Res, 41, 8341-8356.
[0800] 11. Rutherford, K. and Van Duyne, G. D. (2014) The ins and outs of serine integrase site specific recombination. Curr Opin Struct Biol, 24, 125-131.
[0801] 12. Xu, Z., Thomas, L., Davies, B., Chalmers, R., Smith, M. and Brown, W. (2013) Accuracy and efficiency define Bxb1 integrase as the best of fifteen candidate serine recombinases for the integration of DNA into the human genome. BMC Biotechnol, 13, 87.
[0802] 13. Hew, B. E., Gupta, S., Sato, R., Waller, D. F., Stoytchev, I., Short, J. E., Sharek, L., Tran, C. T., Badran, A. H. and Owens, J. B. (2024) Directed evolution of hyperactive integrases for site specific insertion of transgenes. Nucleic Acids Res, 52, e64.
[0803] 14. Merrick, C. A., Zhao, J. and Rosser, S. J. (2018) Serine Integrases: Advancing Synthetic Biology. ACS Synth Biol, 7, 299-310.
[0804] 15. Hazelbaker, D. Z., Mehta, J. B., McGinnis, C., Santesmasses, D., Bara, A. M., Liang, X., Biondi, T., Fennell, T., Homer, N., Estes, B. et al. (2024) Large Serine Integrase Off-target Discovery and Validation for Therapeutic Genome Editing. bioRxiv, 2024.2008.2023.609471.
[0805] 16. Jusiak, B., Jagtap, K., Gaidukov, L., Duportet, X., Bandara, K., Chu, J., Zhang, L., Weiss, R. and Lu, T. K. (2019) Comparison of Integrases Identifies Bxb1-GA Mutant as the Most Efficient Site-Specific Integrase System in Mammalian Cells. ACS Synth Biol, 8, 16-24.
[0806] 17. Kim, A. I., Ghosh, P., Aaron, M. A., Bibb, L. A., Jain, S. and Hatfull, G. F. (2003) Mycobacteriophage Bxb1 integrates into the Mycobacterium smegmatis groEL1 gene. Mol Microbiol, 50, 463-473.
[0807] 18. Ghosh, P., Pannunzio, N. R. and Hatfull, G. F. (2005) Synapsis in phage Bxb1 integration: selection mechanism for the correct pair of recombination sites. J Mol Biol, 349, 331-348.
[0808] 19. Bai, H., Sun, M., Ghosh, P., Hatfull, G. F., Grindley, N. D. and Marko, J. F. (2011) Single-molecule analysis reveals the molecular bearing mechanism of DNA strand exchange by a serine recombinase. Proc Natl Acad Sci USA, 108, 7419-7424.
[0809] 20. Ghosh, P., Wasil, L. R. and Hatfull, G. F. (2006) Control of phage Bxb1 excision by a novel recombination directionality factor. PLoS Biol, 4, e186.
[0810] 21. Li, H., Sharp, R., Rutherford, K., Gupta, K. and Van Duyne, G. D. (2018) Serine Integrase attP Binding and Specificity. J Mol Biol, 430, 4401-4418.
[0811] 22. Rethi-Nagy, Z., Abraham, E., Udvardy, K., Klement, E., Darula, Z., Pal, M., Katona, R. L., Tubak, V., Pali, T., Kota, Z. et al. (2022) STABILON, a Novel Sequence Motif That Enhances the Expression and Accumulation of Intracellular and Secreted Proteins. Int J Mol Sci, 23.
[0812] 23. Zhu, Y., Saribas, A. S., Liu, J., Lin, Y., Bodnar, B., Zhao, R., Guo, Q., Ting, J., Wei, Z., Ellis, A. et al. (2023) Protein expression/secretion boost by a novel unique 21-mer cis-regulatory motif (Exin21) via mRNA stabilization. Mol Ther, 31, 1136-1158.

### 8. SEQUENCES

TABLE 26
Additional Sequences

| SEQ | | |
|---|---|---|
| ID | | |
| NO: | Name | Sequence |
| 615 | PL758 | MKRTADGSEFESPKKKRKVDKKYSIGLDIGTNSVGWAVITDEYKVPSKKFKVLGNTDRH |
| | _AA | SIKKNLIGALLFDSGETAEATRLKRTARRRYTRRKNRICYLQEIFSNEMAKVDDSFFHR |
| | | LEESFLVEEDKKHERHPIFGNIVDEVAYHEKYPTIYHLRKKLVDSTDKADLRLIYLALA |
| | | HMIKFRGHFLIEGDLNPDNSDVDKLFIQLVQTYNQLFEENPINASGVDAKAILSARLSK |
| | | SRRLENLIAQLPGEKKNGLFGNLIALSLGLTPNFKSNFDLAEDAKLQLSKDTYDDDLDN |
| | | LLAQIGDQYADLFLAAKNLSDAILLSDILRVNTEITKAPLSASMIKRYDEHHQDLTLLK |
| | | ALVRQQLPEKYKEIFFDQSKNGYAGYIDGGASQEEFYKFIKPILEKMDGTEELLVKLNR |
| | | EDLLRKQRTFDNGSIPHQIHLGELHAILRRQEDFYPFLKDNREKIEKILTFRIPYYVGP |
| | | LARGNSRFAWMTRKSEETITPWNFEEVVDKGASAQSFIERMTNFDKNLPNEKVLPKHSL |
| | | LYEYFTVYNELTKVKYVTEGMRKPAFLSGEQKKAIVDLLFKTNRKVTVKQLKEDYFKKI |
| | | ECFDSVEISGVEDRFNASLGTYHDLLKIIKDKDFLDNEENEDILEDIVLTLTLFEDREM |
| | | IEERLKTYAHLFDDKVMKQLKRRRYTGWGRLSRKLINGIRDKQSGKTILDFLKSDGFAN |
| | | RNFMQLIHDDSLTFKEDIQKAQVSGQGDSLHEHIANLAGSPAIKKGILQTVKVVDELVK |
| | | VMGRHKPENIVIEMARENQTTQKGQKNSRERMKRIEEGIKELGSQILKEHPVENTQLQN |
| | | EKLYLYYLQNGRDMYVDQELDINRLSDYDVDAIVPQSFLKDDSIDNKVLTRSDKNRGKS |
| | | DNVPSEEVVKKMKNYWRQLLNAKLITQRKFDNLTKAERGGLSELDKAGFIKRQLVETRQ |
| | | ITKHVAQILDSRMNTKYDENDKLIREVKVITLKSKLVSDFRKDFQFYKVREINNYHHAH |
| | | DAYLNAVVGTALIKKYPKLESEFVYGDYKVYDVRKMIAKSEQEIGKATAKYFFYSNIMN |
| | | FFKTEITLANGEIRKRPLIETNGETGEIVWDKGRDFATVRKVLSMPQVNIVKKTEVQTG |
| | | GFSKESILPKRNSDKLIARKKDWDPKKYGGFDSPTVAYSVLWVAKVEKGKSKKLKSVKE |
| | | LLGITIMERSSFEKNPIDFLEAKGYKEVKKDLIIKLPKYSLFELENGRKRMLASAGELQ |
| | | KGNELALPSKYVNFLYLASHYEKLKGSPEDNEQKQLFVEQHKHYLDEIIEQISEFSKRV |
| | | ILADANLDKVLSAYNKHRDKPIREQAENIIHLFTLTNLGAPAAFKYFDTTIDRKRYTST |
| | | KEVLDATLIHQSITGLYETRIDLSQLGGDSGGSSGGSSGSETPGTSESATPESSGGSSG |
| | | GSSTLNIEDEYRLHETSKEPDVSLGSTWLSDFPQAWAETGGMGLAVRQAPLIIPLKATS |
| | | TPVSIKQYPMSQEARLGIKPHIQRLLDQGILVPCQSPWNTPLLPVKKPGTNDYRPVQDL |
| | | REVNKRVEDIHPTVPNPYNLLSGLPPSHQWYTVLDLKDAFFCLRLHPTSQPLFAFEWRD |
| | | PEMGISGQLTWTRLPQGFKNSPTLFNEALHRDLADFRIQHPDLILLQYVDDLLLAATSE |
| | | LDCQQGTRALLQTLGNLGYRASAKKAQICQKQVKYLGYLLKEGQRWLTEARKETVMGQP |
| | | TPKTPRQLREFLGKAGFCRLFIPGFAEMAAPLYPLTKPGTLFNWGPDQQKAYQEIKQAL |
| | | LTAPALGLPDLTKPFELFVDEKQGYAKGVLTQKLGPWRRPVAYLSKKLDPVAAGWPPCL |
| | | RMVAAIAVLTKDAGKLTMGQPLVILAPHAVEALVKQPPDRWLSNARMTHYQALLLDTDR |
| | | VQFGPVVALNPATLLPLPEEGLQHNCLDILAEAHGTRPDLTDQPLPDADHTWYTDGSSL |
| | | LQEGQRKAGAAVTTETEVIWAKALPAGTSAQRAELIALTQALKMAEGKKLNVYTDSRYA |
| | | FATAHIHGEIYRRRGWLTSEGKEIKNKDEILALLKALFLPKRLSIIHCPGHQKGHSAEA |
| | | RGNRMADQAARKAAITETPDTSTLLIENSSPSGGSKRTADGSEFEPKKKRKVGGSVSGW |
| | | RLFKKIS* |
| 616 | PL758_ | ATGAAGAGAACCGCCGACGGCAGCGAGTTCGAGAGCCCCAAGAAGAAGAGAAAGGTGGA |
| | DNA | CAAGAAGTACAGCATCGGCCTGGACATCGGCACCAACAGCGTGGGCTGGGCCGTGATCA |
| | | CCGACGAGTACAAGGTGCCCAGCAAGAAGTTCAAGGTGCTGGGCAACACCGACAGACAC |
| | | AGCATCAAGAAGAACCTGATCGGCGCCCTGCTGTTCGACAGCGGCGAGACCGCCGAGGC |
| | | CACCAGACTGAAGAGAACCGCCAGAAGAAGATACACCAGAAGAAAGAACAGAATCTGCT |
| | | ACCTGCAGGAGATCTTCAGCAACGAGATGGCCAAGGTGGACGACAGCTTCTTCCACAGA |
| | | CTGGAGGAGAGCTTCCTGGTGGAGGAGGACAAGAAGCACGAGAGACACCCCATCTTCGG |
| | | CAACATCGTGGACGAGGTGGCCTACCACGAGAAGTACCCCACCATCTACCACCTGAGAA |
| | | AGAAGCTGGTGGACAGCACCGACAAGGCCGACCTGAGACTGATCTACCTGGCCCTGGCC |
| | | CACATGATCAAGTTCAGAGGCCACTTCCTGATCGAGGGCGACCTGAACCCCGACAACAG |
| | | CGACGTGGACAAGCTGTTCATCCAGCTGGTGCAGACCTACAACCAGCTGTTCGAGGAGA |
| | | ACCCCATCAACGCCAGCGGCGTGGACGCCAAGGCCATCCTGAGCGCCAGACTGAGCAAG |
| | | AGCAGAAGACTGGAGAACCTGATCGCCCAGCTGCCCGGCGAGAAGAAGAACGGCCTGTT |
| | | CGGCAACCTGATCGCCCTGAGCCTGGGCCTGACCCCCAACTTCAAGAGCAACTTCGACC |
| | | TGGCCGAGGACGCCAAGCTGCAGCTGAGCAAGGACACCTACGACGACGACCTGGACAAC |
| | | CTGCTGGCCCAGATCGGCGACCAGTACGCCGACCTGTTCCTGGCCGCCAAGAACCTGAG |
| | | CGACGCCATCCTGCTGAGCGACATCCTGAGAGTGAACACCGAGATCACCAAGGCCCCCC |
| | | TGAGCGCCAGCATGATCAAGAGATACGACGAGCACCACCAGGACCTGACCCTGCTGAAG |
| | | GCCCTGGTGAGACAGCAGCTGCCCGAGAAGTACAAGGAGATCTTCTTCGACCAGAGCAA |
| | | GAACGGCTACGCCGGCTACATCGACGGCGGCGCCAGCCAGGAGGAGTTCTACAAGTTCA |
| | | TCAAGCCCATCCTGGAGAAGATGGACGGCACCGAGGAGCTGCTGGTGAAGCTGAACAGA |
| | | GAGGACCTGCTGAGAAAGCAGAGAACCTTCGACAACGGCAGCATCCCCCACCAGATCCA |
| | | CCTGGGCGAGCTGCACGCCATCCTGAGAAGACAGGAGGACTTCTACCCCTTCCTGAAGG |
| | | ACAACAGAGAGAAGATCGAGAAGATCCTGACCTTCAGAATCCCCTACTACGTGGGCCCC |
| | | CTGGCCAGAGGCAACAGCAGATTCGCCTGGATGACCAGAAAGAGCGAGGAGACCATCAC |
| | | CCCCTGGAACTTCGAGGAGGTGGTGGACAAGGGCGCCAGCGCCCAGAGCTTCATCGAGA |
| | | GAATGACCAACTTCGACAAGAACCTGCCCAACGAGAAGGTGCTGCCCAAGCACAGCCTG |
| | | CTGTACGAGTACTTCACCGTGTACAACGAGCTGACCAAGGTGAAGTACGTGACCGAGGG |
| | | CATGAGAAAGCCCGCCTTCCTGAGCGGCGAGCAGAAGAAGGCCATCGTGGACCTGCTGT |
| | | TCAAGACCAACAGAAAGGTGACCGTGAAGCAGCTGAAGGAGGACTACTTCAAGAAGATC |
| | | GAGTGCTTCGACAGCGTGGAGATCAGCGGCGTGGAGGACAGATTCAACGCCAGCCTGGG |
| | | CACCTACCACGACCTGCTGAAGATCATCAAGGACAAGGACTTCCTGGACAACGAGGAGA |
| | | ACGAGGACATCCTGGAGGACATCGTGCTGACCCTGACCCTGTTCGAGGACAGAGAGATG |
| | | ATCGAGGAGAGACTGAAGACCTACGCCCACCTGTTCGACGACAAGGTGATGAAGCAGCT |
| | | GAAGAGAAGAAGATACACCGGCTGGGGCAGACTGAGCAGAAAGCTGATCAACGGCATCA |
| | | GAGACAAGCAGAGCGGCAAGACCATCCTGGACTTCCTGAAGAGTGACGGCTTCGCCAAC |
| | | AGAAACTTCATGCAGCTGATCCACGACGACAGCCTGACCTTCAAGGAGGACATCCAGAA |
| | | GGCCCAGGTGAGCGGCCAGGGCGACAGCCTGCACGAGCACATCGCCAACCTGGCCGGCA |
| | | GCCCCGCCATCAAGAAGGGCATCCTGCAGACCGTGAAGGTGGTGGACGAGCTGGTGAAG |
| | | GTGATGGGCAGACACAAGCCCGAGAACATCGTGATCGAGATGGCCAGAGAGAACCAGAC |
| | | CACCCAGAAGGGCCAGAAGAACAGCAGAGAGAGAATGAAGAGAATCGAGGAGGGCATCA |
| | | AGGAGCTGGGCAGCCAGATCCTGAAGGAGCACCCCGTGGAGAACACCCAGCTGCAGAAC |
| | | GAGAAGCTGTACCTGTACTACCTGCAGAACGGCAGAGACATGTACGTGGACCAGGAGCT |
| | | GGACATCAACAGACTGAGCGACTACGACGTGGACGCCATCGTGCCCCAGAGCTTCCTGA |
| | | AGGACGACAGCATCGACAACAAGGTGCTGACCAGAAGCGACAAGAACAGAGGCAAGAGC |
| | | GACAACGTGCCCAGCGAGGAGGTGGTGAAGAAGATGAAGAACTACTGGAGACAGCTGCT |
| | | GAACGCCAAGCTGATCACCCAGAGAAAGTTCGACAACCTGACCAAGGCCGAGAGAGGCG |
| | | GCCTGAGCGAGCTGGACAAGGCCGGCTTCATCAAGAGACAGCTGGTGGAGACCAGACAG |
| | | ATCACCAAGCACGTGGCCCAGATCCTGGACAGCAGAATGAACACCAAGTACGACGAGAA |
| | | CGACAAGCTGATCAGAGAGGTGAAGGTGATCACCCTGAAGAGTAAGCTGGTGAGCGACT |
| | | TCAGAAAGGACTTCCAGTTCTACAAGGTGAGAGAGATCAACAACTACCACCACGCCCAC |
| | | GACGCCTACCTGAACGCCGTGGTGGGCACCGCCCTGATCAAGAAGTACCCCAAGCTGGA |
| | | GAGCGAGTTCGTGTACGGCGACTACAAGGTGTACGACGTGAGAAAGATGATCGCCAAGA |
| | | GCGAGCAGGAGATCGGCAAGGCCACCGCCAAGTACTTCTTCTACAGCAACATCATGAAC |
| | | TTCTTCAAGACCGAGATCACCCTGGCCAACGGCGAGATCAGAAAGAGACCCCTGATCGA |
| | | GACCAACGGCGAGACCGGCGAGATCGTGTGGGACAAGGGCAGAGACTTCGCCACCGTGA |
| | | GAAAGGTGCTGAGCATGCCCCAGGTGAACATCGTGAAGAAGACCGAGGTGCAGACCGGC |
| | | GGCTTCAGCAAGGAGAGCATCCTGCCCAAGAGAAACAGCGACAAGCTGATCGCCAGAAA |
| | | GAAGGACTGGGACCCCAAGAAGTACGGCGGCTTCGACAGCCCCACCGTGGCCTACAGCG |
| | | TGCTGGTGGTGGCCAAGGTGGAGAAGGGCAAGAGCAAGAAGCTGAAGAGTGTGAAGGAG |
| | | CTGCTGGGCATCACCATCATGGAGAGAAGCAGCTTCGAGAAGAACCCCATCGACTTCCT |
| | | GGAGGCCAAGGGCTACAAGGAGGTGAAGAAGGACCTGATCATCAAGCTGCCCAAGTACA |
| | | GCCTGTTCGAGCTGGAGAACGGCAGAAAGAGAATGCTGGCCAGCGCCGGCGAGCTGCAG |
| | | AAGGGCAACGAGCTGGCCCTGCCCAGCAAGTACGTGAACTTCCTGTACCTGGCCAGCCA |
| | | CTACGAGAAGCTGAAGGGCAGCCCCGAGGACAACGAGCAGAAGCAGCTGTTCGTGGAGC |
| | | AGCACAAGCACTACCTGGACGAGATCATCGAGCAGATCAGCGAGTTCAGCAAGAGAGTG |
| | | ATCCTGGCCGACGCCAACCTGGACAAGGTGCTGAGCGCCTACAACAAGCACAGAGACAA |
| | | GCCCATCAGAGAGCAGGCCGAGAACATCATCCACCTGTTCACCCTGACCAACCTGGGCG |
| | | CCCCCGCCGCCTTCAAGTACTTCGACACCACCATCGACAGAAAGAGATACACCAGCACC |
| | | AAGGAGGTGCTGGACGCCACCCTGATCCACCAGAGCATCACCGGCCTGTACGAGACCAG |
| | | AATCGACCTGAGCCAGCTGGGGGGCGACAGCGGCGGCAGCAGCGGCGGCAGCAGCGGCA |
| | | GCGAGACCCCCGGCACCAGCGAGAGCGCCACCCCCGAGAGCAGCGGCGGCAGCAGCGGC |
| | | GGCAGCAGCACCCTGAACATCGAGGACGAGTACAGACTGCACGAGACCAGCAAGGAGCC |
| | | CGACGTGAGCCTGGGCAGCACCTGGCTGAGCGACTTCCCCCAGGCCTGGGCCGAGACCG |
| | | GCGGCATGGGCCTGGCCGTGAGACAGGCCCCCCTGATCATCCCCCTGAAGGCCACCAGC |
| | | ACCCCCGTGAGCATCAAGCAGTACCCCATGAGCCAGGAGGCCAGACTGGGCATCAAGCC |
| | | CCACATCCAGAGACTGCTGGACCAGGGCATCCTGGTGCCCTGCCAGAGCCCCTGGAACA |
| | | CCCCCCTGCTGCCCGTGAAGAAGCCCGGCACCAACGACTACAGACCCGTGCAGGACCTG |
| | | AGAGAGGTGAACAAGAGAGTGGAGGACATCCACCCCACCGTGCCCAACCCCTACAACCT |
| | | GCTGAGCGGCCTGCCCCCCAGCCACCAGTGGTACACCGTGCTGGACCTGAAGGACGCCT |
| | | TCTTCTGCCTGAGACTGCACCCCACCAGCCAGCCCCTGTTCGCCTTCGAGTGGAGAGAC |
| | | CCCGAGATGGGCATCAGCGGCCAGCTGACCTGGACCAGACTGCCCCAGGGCTTCAAGAA |
| | | CAGCCCCACCCTGTTCAACGAGGCCCTGCACAGAGACCTGGCCGACTTCAGAATCCAGC |
| | | ACCCCGACCTGATCCTGCTGCAGTACGTGGACGACCTGCTGCTGGCCGCCACCAGCGAG |
| | | CTGGACTGCCAGCAGGGCACCAGAGCCCTGCTGCAGACCCTGGGCAACCTGGGCTACAG |
| | | AGCCAGCGCCAAGAAGGCCCAGATCTGCCAGAAGCAGGTGAAGTACCTGGGCTACCTGC |
| | | TGAAGGAGGGCCAGAGATGGCTGACCGAGGCCAGAAAGGAGACCGTGATGGGCCAGCCC |
| | | ACCCCCAAGACCCCCAGACAGCTGAGAGAGTTCCTGGGCAAGGCCGGCTTCTGCAGACT |
| | | GTTCATCCCCGGCTTCGCCGAGATGGCCGCCCCCCTGTACCCCCTGACCAAGCCCGGCA |
| | | CCCTGTTCAACTGGGGCCCCGACCAGCAGAAGGCCTACCAGGAGATCAAGCAGGCCCTG |
| | | CTGACCGCCCCCGCCCTGGGCCTGCCCGACCTGACCAAGCCCTTCGAGCTGTTCGTGGA |
| | | CGAGAAGCAGGGCTACGCCAAGGGCGTGCTGACCCAGAAGCTGGGCCCCTGGAGAAGAC |
| | | CCGTGGCCTACCTGAGCAAGAAGCTGGACCCCGTGGCCGCCGGCTGGCCCCCCTGCCTG |
| | | AGAATGGTGGCCGCCATCGCCGTGCTGACCAAGGACGCCGGCAAGCTGACCATGGGCCA |
| | | GCCCCTGGTGATCCTGGCCCCCCACGCCGTGGAGGCCCTGGTGAAGCAGCCCCCCGACA |
| | | GATGGCTGAGCAACGCCAGAATGACCCACTACCAGGCCCTGCTGCTGGACACCGACAGA |
| | | GTGCAGTTCGGCCCCGTGGTGGCCCTGAACCCCGCCACCCTGCTGCCCCTGCCCGAGGA |
| | | GGGCCTGCAGCACAACTGCCTGGACATCCTGGCCGAGGCCCACGGCACCAGACCCGACC |
| | | TGACCGACCAGCCCCTGCCCGACGCCGACCACACCTGGTACACCGACGGCAGCAGCCTG |
| | | CTGCAGGAGGGCCAGAGAAAGGCCGGCGCCGCCGTGACCACCGAGACCGAGGTGATCTG |
| | | GGCCAAGGCCCTGCCCGCCGGCACCAGCGCCCAGAGAGCCGAGCTGATCGCCCTGACCC |
| | | AGGCCCTGAAGATGGCCGAGGGCAAGAAGCTGAACGTGTACACCGACAGCAGATACGCC |
| | | TTCGCCACCGCCCACATCCACGGCGAGATCTACAGAAGAAGAGGCTGGCTGACCAGCGA |
| | | GGGCAAGGAGATCAAGAACAAGGACGAGATCCTGGCCCTGCTGAAGGCCCTGTTCCTGC |
| | | CCAAGAGACTGAGCATCATCCACTGCCCCGGCCACCAGAAGGGCCACAGCGCCGAGGCC |
| | | AGAGGCAACAGAATGGCCGACCAGGCCGCCAGAAAGGCCGCCATCACCGAGACCCCCGA |
| | | CACCAGCACCCTGCTGATCGAGAACAGCAGCCCCAGCGGCGGCAGCAAGAGAACCGCCG |
| | | ACGGCAGCGAGTTCGAGCCCAAGAAGAAGAGAAAGGTGGGCGGCAGCGTGAGCGGCTGG |
| | | AGACTGTTCAAGAAGATCAGCTGA |
| 617 | PL883 | MKRTADGSEFESPKKKRKVDKKYSIGLDIGTNSVGWAVITDEYKVPSKKFKVLGNTDRH |
| | _AA | SIKKNLIGALLFDSGETAEATRLKRTARRRYTRRKNRICYLQEIFSNEMAKVDDSFFHR |
| | | LEESFLVEEDKKHERHPIFGNIVDEVAYHEKYPTIYHLRKKLVDSTDKADLRLIYLALA |
| | | HMIKFRGHFLIEGDLNPDNSDVDKLFIQLVQTYNQLFEENPINASGVDAKAILSARLSK |
| | | SRRLENLIAQLPGEKKNGLFGNLIALSLGLTPNFKSNFDLAEDAKLQLSKDTYDDDLDN |
| | | LLAQIGDQYADLFLAAKNLSDAILLSDILRVNTEITKAPLSASMIKRYDEHHQDLTLLK |
| | | ALVRQQLPEKYKEIFFDQSKNGYAGYIDGGASQEEFYKFIKPILEKMDGTEELLVKLNR |
| | | EDLLRKQRTFDNGSIPHQIHLGELHAILRRQEDFYPFLKDNREKIEKILTFRIPYYVGP |
| | | LARGNSRFAWMTRKSEETITPWNFEEVVDKGASAQSFIERMTNFDKNLPNEKVLPKHSL |
| | | LYEYFTVYNELTKVKYVTEGMRKPAFLSGEQKKAIVDLLFKTNRKVTVKQLKEDYFKKI |
| | | ECFDSVEISGVEDRFNASLGTYHDLLKIIKDKDFLDNEENEDILEDIVLTLTLFEDREM |
| | | IEERLKTYAHLFDDKVMKQLKRRRYTGWGRLSRKLINGIRDKQSGKTILDFLKSDGFAN |
| | | RNFMQLIHDDSLTFKEDIQKAQVSGQGDSLHEHIANLAGSPAIKKGILQTVKVVDELVK |
| | | VMGRHKPENIVIEMARENQTTQKGQKNSRERMKRIEEGIKELGSQILKEHPVENTQLQN |
| | | EKLYLYYLQNGRDMYVDQELDINRLSDYDVDAIVPQSFLKDDSIDNKVLTRSDKNRGKS |
| | | DNVPSEEVVKKMKNYWRQLLNAKLITQRKFDNLTKAERGGLSELDKAGFIKRQLVETRQ |
| | | ITKHVAQILDSRMNTKYDENDKLIREVKVITLKSKLVSDFRKDFQFYKVREINNYHHAH |
| | | DAYLNAVVGTALIKKYPKLESEFVYGDYKVYDVRKMIAKSEQEIGKATAKYFFYSNIMN |
| | | FFKTEITLANGEIRKRPLIETNGETGEIVWDKGRDFATVRKVLSMPQVNIVKKTEVQTG |
| | | GFSKESILPKRNSDKLIARKKDWDPKKYGGFDSPTVAYSVLWVAKVEKGKSKKLKSVKE |
| | | LLGITIMERSSFEKNPIDFLEAKGYKEVKKDLIIKLPKYSLFELENGRKRMLASAGELQ |
| | | KGNELALPSKYVNFLYLASHYEKLKGSPEDNEQKQLFVEQHKHYLDEIIEQISEFSKRV |
| | | ILADANLDKVLSAYNKHRDKPIREQAENIIHLFTLTNLGAPAAFKYFDTTIDRKRYTST |
| | | KEVLDATLIHQSITGLYETRIDLSQLGGDSGGSSGGSSGSETPGTSESATPESSGGSSG |
| | | GSSTLNIEDEYRLHETSKEPDVSLGSTWLSDFPQAWAETGGMGLAVRQAPLIIPLKATS |
| | | TPVSIKQYPMSQEARLGIKPHIQRLLDQGILVPCQSPWNTPLLPVKKPGTNDYRPVQDL |
| | | REVNKRVEDIHPTVPNPYNLLSGLPPSHQWYTVLDLKDAFFCLRLHPTSQPLFAFEWRD |
| | | PEMGISGQLTWTRLPQGFKNSPTLFNEALHRDLADFRIQHPDLILLQYVDDLLLAATSE |
| | | LDCQQGTRALLQTLGNLGYRASAKKAQICQKQVKYLGYLLKEGQRWLTEARKETVMGQP |
| | | TPKTPRQLREFLGKAGFCRLFIPGFAEMAAPLYPLTKPGTLFNWGPDQQKAYQEIKQAL |
| | | LTAPALGLPDLTKPFELFVDEKQGYAKGVLTQKLGPWRRPVAYLSKKLDPVAAGWPPCL |
| | | RMVAAIAVLTKDAGKLTMGQPLVILAPHAVEALVKQPPDRWLSNARMTHYQALLLDTDR |
| | | VQFGPVVALNPATLLPLPEEGLQHNCLDILAEAHGTRPDLTDQPLPDADHTWYTDGSSL |
| | | LQEGQRKAGAAVTTETEVIWAKALPAGTSAQRAELIALTQALKMAEGKKLNVYTDSRYA |
| | | FATAHIHGEIYRRRGWLTSEGKEIKNKDEILALLKALFLPKRLSIIHCPGHQKGHSAEA |
| | | RGNRMADQAARKAAITETPDTSTLLIENSSPSGGSKRTADGSEFEPKKKRKV* |
| 618 | PL1323 | MPAAKRVKLDGGSRALWIRLSRVTDATTSPERQLESCQQLCAQRGWDVVGVAEDLDVSG |
| | _AA | AVDPFDRKRRPNLARWLAFEEQPFDVIVAYRVDRLTRSIRHLQQLVHWAEDHKKLVVSA |
| | | TEAHFDTTTPFAAVVIALMGTVAQMELEAIKERNRSAAHFNIRAGKYRGSLPPWGYLPT |
| | | RVDGEWRLVPDPVQRERILEVYHRVVDNHEPLHLVAHDLNRRGVLSPKDYFAQLQGREP |
| | | QGREWSATALKRSMISEAMLGYATLNGKTVRDDDGAPLVRAEPILTREQLEALRAELVK |
| | | TSRAKPAVSTPSLLLRVLFCAVCGEPAYKFAGGGRKHPRYRCRSMGFPKHCGNGTVAMA |
| | | EWDAFCEEQVLDLLGDAERLEKVWVAGSDSAVELAEVNAELVDLTSLIGSPAYRAGSPQ |
| | | REALDARIAALAARQEELEGLEARPSGWEWRETGQRFGDWWREQDTAAKNTWLRSMNVR |
| | | LTFDVRGGLTRTIDFGDLQEYEQHLRLGSVVERLHTGMSGGSPKKKRKV* |
| 619 | PL1323_ | ATGcctgctgctaagagagtgaaactggatggcggcagcAGAGCCCTGGTGGTGATCAG |
| | DNA | ACTGAGCAGAGTGACCGACGCCACCACCAGCCCCGAGAGACAGCTGGAGAGCTGCCAGC |
| | | AGCTGTGCGCCCAGAGAGGCTGGGACGTGGTGGGCGTGGCCGAGGACCTGGACGTGAGC |
| | | GGCGCCGTGGACCCCTTCGACAGAAAGAGAAGACCCAACCTGGCCAGATGGCTGGCCTT |
| | | CGAGGAGCAGCCCTTCGACGTGATCGTGGCCTACAGAGTGGACAGACTGACCAGAAGCA |
| | | TCAGACACCTGCAGCAGCTGGTGCACTGGGCCGAGGACCACAAGAAGCTGGTGGTGAGC |
| | | GCCACCGAGGCCCACTTCGACACCACCACCCCCTTCGCCGCCGTGGTGATCGCCCTGAT |
| | | GGGCACCGTGGCCCAGATGGAGCTGGAGGCCATCAAGGAGAGAAACAGAAGCGCCGCCC |
| | | ACTTCAACATCAGAGCCGGCAAGTACAGAGGCAGCCTGCCCCCCTGGGGCTACCTGCCC |
| | | ACCAGAGTGGACGGCGAGTGGAGACTGGTGCCCGACCCCGTGCAGAGAGAGAGAATCCT |
| | | GGAGGTGTACCACAGAGTGGTGGACAACCACGAGCCCCTGCACCTGGTGGCCCACGACC |
| | | TGAACAGAAGAGGCGTGCTGAGCCCCAAGGACTACTTCGCCCAGCTGCAGGGCAGAGAG |
| | | CCCCAGGGCAGAGAGTGGAGCGCCACCGCCCTGAAGAGAAGCATGATCAGCGAGGCCAT |
| | | GCTGGGCTACGCCACCCTGAACGGCAAGACCGTGAGAGACGACGACGGCGCCCCCCTGG |
| | | TGAGAGCCGAGCCCATCCTGACCAGAGAGCAGCTGGAGGCCCTGAGAGCCGAGCTGGTG |
| | | AAGACCAGCAGAGCCAAGCCCGCCGTGAGCACCCCCAGCCTGCTGCTGAGAGTGCTGTT |
| | | CTGCGCCGTGTGCGGCGAGCCCGCCTACAAGTTCGCCGGCGGCGGCAGAAAGCACCCCA |
| | | GATACAGATGCAGAAGCATGGGCTTCCCCAAGCACTGCGGCAACGGCACCGTGGCCATG |
| | | GCCGAGTGGGACGCCTTCTGCGAGGAGCAGGTGCTGGACCTGCTGGGCGACGCCGAGAG |
| | | ACTGGAGAAGGTGTGGGTGGCCGGCAGCGACAGCGCCGTGGAGCTGGCCGAGGTGAACG |
| | | CCGAGCTGGTGGACCTGACCAGCCTGATCGGCAGCCCCGCCTACAGAGCCGGCAGCCCC |
| | | CAGAGAGAGGCCCTGGACGCCAGAATCGCCGCCCTGGCCGCCAGACAGGAGGAGCTGGA |
| | | GGGCCTGGAGGCCAGACCCAGCGGCTGGGAGTGGAGAGAGACCGGCCAGAGATTCGGCG |
| | | ACTGGTGGAGAGAGCAGGACACCGCCGCCAAGAACACCTGGCTGAGAAGCATGAACGTG |
| | | AGACTGACCTTCGACGTGAGAGGCGGCCTGACCAGAACCATCGACTTCGGCGACCTGCA |
| | | GGAGTACGAGCAGCACCTGAGACTGGGCAGCGTGGTGGAGAGACTGCACACCGGCATGA |
| | | GCGGCGGCAGCCCCAAGAAGAAGAGAAAGGTGTGA |
| 620 | PL1324_ | tcgcgcgtttcggtgatgacggtgaaaacctctgacacatgcagctcccggagacggtc |
| | DNA | acagcttgtctgtaagcggatgccgggagcagacaagcccgtcagggcgcgtcagcggg |
| | | tgttggcgggtgtcggggctggcttaactatgcggcatcagagcagattgtactgagag |
| | | tgcaccatatgcggtgtgaaataccgcacagatgcgtaaggagaaaataccgcatcagg |
| | | cgccattcgccattcaggctgcgcaactgttgggaagggcgatcggtgcgggcctcttc |
| | | gctattacgccagctggcgaaagggggatgtgctgcaaggcgattaagttgggtaacgc |
| | | cagggttttcccagtcacgacgttgtaaaacgacggccagagaattcgagctcggtacc |
| | | TAATACGACTCACTATAaGGAAGCTCAGAATAAACGCTCAACTTTGGCCGGATCTGCCA |
| | | CCATGCCCAAGAAGAAGAGAAAGGTGTACCCCTACGACGTGCCCGACTACGCCGGCAGC |
| | | AGAGCCCTGGTGGTGATCAGACTGAGCAGAGTGACCGACGCCACCACCAGCCCCGAGAG |
| | | ACAGCTGGAGAGCTGCCAGCAGCTGTGCGCCCAGAGAGGCTGGGACGTGGTGGGCGTGG |
| | | CCGAGGACCTGGACGTGAGCGGCGCCGTGGACCCCTTCGACAGAAAGAGAAGACCCAAC |
| | | CTGGCCAGATGGCTGGCCTTCGAGGAGCAGCCCTTCGACGTGATCGTGGCCTACAGAGT |
| | | GGACAGACTGACCAGAAGCATCAGACACCTGCAGCAGCTGGTGCACTGGGCCGAGGACC |
| | | ACAAGAAGCTGGTGGTGAGCGCCACCGAGGCCCACTTCGACACCACCACCCCCTTCGCC |
| | | GCCGTGGTGATCGCCCTGATGGGCACCGTGGCCCAGATGGAGCTGGAGGCCATCAAGGA |
| | | GAGAAACAGAAGCGCCGCCCACTTCAACATCAGAGCCGGCAAGTACAGAGGCAGCCTGC |
| | | CCCCCTGGGGCTACCTGCCCACCAGAGTGGACGGCGAGTGGAGACTGGTGCCCGACCCC |
| | | GTGCAGAGAGAGAGAATCCTGGAGGTGTACCACAGAGTGGTGGACAACCACGAGCCCCT |
| | | GCACCTGGTGGCCCACGACCTGAACAGAAGAGGCGTGCTGAGCCCCAAGGACTACTTCG |
| | | CCCAGCTGCAGGGCAGAGAGCCCCAGGGCAGAGAGTGGAGCGCCACCGCCCTGAAGAGA |
| | | AGCATGATCAGCGAGGCCATGCTGGGCTACGCCACCCTGAACGGCAAGACCGTGAGAGA |
| | | CGACGACGGCGCCCCCCTGGTGAGAGCCGAGCCCATCCTGACCAGAGAGCAGGTGGAGG |
| | | CCCTGAGAGCCGAGCTGGTGAAGACCAGCAGAGCCAAGCCCGCCGTGAGCACCCCCAGC |
| | | CTGCTGCTGAGAGTGCTGTTCTGCGCCGTGTGCGGCGAGCCCGCCTACAAGTTCGCCGG |
| | | CGGCGGCAGAAAGCACCCCAGATACAGATGCAGAAGCATGGGCTTCCCCAAGCACTGCG |
| | | GCAACGGCACCGTGGCCATGGCCGAGTGGGACGCCTTCTGCGAGGAGCAGGTGCTGGAC |
| | | CTGCTGGGCGACGCCGAGAGACTGGAGAAGGTGTGGGTGGCCGGCAGCGACAGCGCCGT |
| | | GGAGCTGGCCGAGGTGAACGCCGAGCTGGTGGACCTGACCAGCCTGATCGGCAGCCCCG |
| | | CCTACAGAGCCGGCAGCCCCCAGAGAGAGGCCCTGGACGCCAGAATCGCCGCCCTGGCC |
| | | GCCAGACAGGAGGAGCTGGAGGGCCTGGAGGCCAGACCCAGCGGCTGGGAGTGGAGAGA |
| | | GACCGGCCAGAGATTCGGCGACTGGTGGAGAGAGCAGGACACCGCCGCCAAGAACACCT |
| | | GGCTGAGAAGCATGAACGTGAGACTGACCTTCGACGTGAGAGGCGGCCTGACCAGAACC |
| | | ATCGACTTCGGCGACCTGCAGGAGTACGAGCAGCACCTGAGACTGGGCAGCGTGGTGGA |
| | | GAGACTGCACACCGGCATGAGCTGATGAACCAGCCTCAAGAACACCCGAATGGAGTCTC |
| | | TAAGCTACATAATACCAACTTACACTTTACAAAATGTTGTCCCCCAAAATGTAGCCATT |
| | | CGTATCTGCTCCTAATAAAAAGAAAGTTTCTTCACATTCTAAAAAAAAAAAAAAAAAAA |
| | | AAAAAAAAAAAAAAAAAAAAAAAAAAAAAAAAAAAAAAAAAAAAAAAAAAAAAAAAAAA |
| | | AAtgaagagcaggcctgcatgcaagcttctagcataaccccttggggcctctaaacggg |
| | | tcttgaggggttttttgggtgtaatcatggtcatagctgtttcctgtgtgaacagcctg |
| | | gggctcaccttcggggggcctttctgcgggtgcctaatgagtgagctaactcacattaa |
| | | ttgcgttgcgctcactgcccgctttccagtcgggaaacctgtcgtgccagctgcattaa |
| | | tgaatcggccaacgcgcggggagaggcggtttgcgtattgggcgccgaagaaaggccca |
| | | cccgtgaaggtgagcctcttccgcttcctcgctcactgactcgctgcgctcggtcgttc |
| | | ggctgcggcgagcggtatcagctcactcaaaggcggtaatacggttatccacagaatca |
| | | ggggataacgcaggaaagaacatgtgagcaaaaggccagcaaaaggccaggaaccgtaa |
| | | aaaggccgcgttgctggcgtttttccataggctccgcccccctgacgagcatcacaaaa |
| | | atcgacgctcaagtcagaggtggcgaaacccgacaggactataaagataccaggcgttt |
| | | ccccctggaagctccctcgtgcgctctcctgttccgaccctgccgcttaccggatacct |
| | | gtccgcctttctcccttcgggaagcgtggcgctttctcatagctcacgctgtaggtatc |
| | | tcagttcggtgtaggtcgttcgctccaagctgggctgtgtgcacgaaccccccgttcag |
| | | cccgaccgctgcgccttatccggtaactatcgtcttgagtccaacccggtaagacacga |
| | | cttatcgccactggcagcagccactggtaacaggattagcagagcgaggtatgtaggcg |
| | | gtgctacagagttcttgaagtggtggcctaactacggctacactagaagaacagtattt |
| | | ggtatctgcgctctgctgaagccagttaccttcggaaaaagagttggtagctcttgatc |
| | | cggcaaacaaaccaccgctggtagcggtggtttttttgtttgcaagcagcagattacgc |
| | | gcagaaaaaaaggatctcaagaagatcctttgatcttttctacggggtctgacgctcag |
| | | tggaacgaaaactcacgttaagggattttggtcatgagattatcaaaaaggatcttcac |
| | | ctagatccttttaaattaaaaatgaagttttaaatcaagcccaatctgaataatgttac |
| | | aaccaattaaccaattctgattagaaaaactcatcgagcatcaaatgaaactgcaattt |
| | | attcatatcaggattatcaataccatatttttgaaaaagccgtttctgtaatgaaggag |
| | | aaaactcaccgaggcagttccataggatggcaagatcctggtatcggtctgcgattccg |
| | | actcgtccaacatcaatacaacctattaatttcccctcgtcaaaaataaggttatcaag |
| | | tgagaaatcaccatgagtgacgactgaatccggtgagaatggcaaaagtttatgcattt |
| | | ctttccagacttgttcaacaggccagccattacgctcgtcatcaaaatcactcgcatca |
| | | accaaaccgttattcattcgtgattgcgcctgagcgagacgaaatacgcgatcgctgtt |
| | | aaaaggacaattacaaacaggaatcgaatgcaaccggcgcaggaacactgccagcgcat |
| | | caacaatattttcacctgaatcaggatattcttctaatacctggaatgctgtttttccg |
| | | gggatcgcagtggtgagtaaccatgcatcatcaggagtacggataaaatgcttgatggt |
| | | cggaagaggcataaattccgtcagccagtttagtctgaccatctcatctgtaacatcat |
| | | tggcaacgctacctttgccatgtttcagaaacaactctggcgcatcgggcttcccatac |
| | | aagcgatagattgtcgcacctgattgcccgacattatcgcgagcccatttatacccata |
| | | taaatcagcatccatgttggaatttaatcgcggcctcgacgtttcccgttgaatatggc |
| | | tcataacaccccttgtattactgtttatgtaagcagacagttttattgttcatgatgat |
| | | atatttttatcttgtgcaatgtaacatcagagattttgagacacgggccagagctgca |
| 621 | PL1325 | MPKKKRKVYPYDVPDYAKDKKSDGKDSQKKGSRALWIRLSRVTDATTSPERQLESCQQL |
| | _AA | CAQRGWDVVGVAEDLDVSGAVDPFDRKRRPNLARWLAFEEQPFDVIVAYRVDRLTRSIR |
| | | HLQQLVHWAEDHKKLVVSATEAHFDTTTPFAAVVIALMGTVAQMELEAIKERNRSAAHF |
| | | NIRAGKYRGSLPPWGYLPTRVDGEWRLVPDPVQRERILEVYHRVVDNHEPLHLVAHDLN |
| | | RRGVLSPKDYFAQLQGREPQGREWSATALKRSMISEAMLGYATLNGKTVRDDDGAPLVR |
| | | AEPILTREQLEALRAELVKTSRAKPAVSTPSLLLRVLFCAVCGEPAYKFAGGGRKHPRY |
| | | RCRSMGFPKHCGNGTVAMAEWDAFCEEQVLDLLGDAERLEKVWVAGSDSAVELAEVNAE |
| | | LVDLTSLIGSPAYRAGSPQREALDARIAALAARQEELEGLEARPSGWEWRETGQRFGDW |
| | | WREQDTAAKNTWLRSMNVRLTFDVRGGLTRTIDFGDLQEYEQHLRLGSVVERLHTGMS* |
| 622 | PL1935_ | ATGCCCAAGAAGAAGAGAAAGGTGTACCCCTACGACGTGCCCGACTACGCCAAGGACAA |
| | DNA | GAAATCCGATGGCAAGGACAGCCAGAAAAAAGGCAGCAGAGCCCTGGTGGTGATCAGAC |
| | | TGAGCAGAGTGACCGACGCCACCACCAGCCCCGAGAGACAGCTGGAGAGCTGCCAGCAG |
| | | CTGTGCGCCCAGAGAGGCTGGGACGTGGTGGGCGTGGCCGAGGACCTGGACGTGAGCGG |
| | | CGCCGTGGACCCCTTCGACAGAAAGAGAAGACCCAACCTGGCCAGATGGCTGGCCTTCG |
| | | AGGAGCAGCCCTTCGACGTGATCGTGGCCTACAGAGTGGACAGACTGACCAGAAGCATC |
| | | AGACACCTGCAGCAGCTGGTGCACTGGGCCGAGGACCACAAGAAGCTGGTGGTGAGCGC |
| | | CACCGAGGCCCACTTCGACACCACCACCCCCTTCGCCGCCGTGGTGATCGCCCTGATGG |
| | | GCACCGTGGCCCAGATGGAGCTGGAGGCCATCAAGGAGAGAAACAGAAGCGCCGCCCAC |
| | | TTCAACATCAGAGCCGGCAAGTACAGAGGCAGCCTGCCCCCCTGGGGCTACCTGCCCAC |
| | | CAGAGTGGACGGCGAGTGGAGACTGGTGCCCGACCCCGTGCAGAGAGAGAGAATCCTGG |
| | | AGGTGTACCACAGAGTGGTGGACAACCACGAGCCCCTGCACCTGGTGGCCCACGACCTG |
| | | AACAGAAGAGGCGTGCTGAGCCCCAAGGACTACTTCGCCCAGCTGCAGGGCAGAGAGCC |
| | | CCAGGGCAGAGAGTGGAGCGCCACCGCCCTGAAGAGAAGCATGATCAGCGAGGCCATGC |
| | | TGGGCTACGCCACCCTGAACGGCAAGACCGTGAGAGACGACGACGGCGCCCCCCTGGTG |
| | | AGAGCCGAGCCCATCCTGACCAGAGAGCAGCTGGAGGCCCTGAGAGCCGAGCTGGTGAA |
| | | GACCAGCAGAGCCAAGCCCGCCGTGAGCACCCCCAGCCTGCTGCTGAGAGTGCTGTTCT |
| | | GCGCCGTGTGCGGCGAGCCCGCCTACAAGTTCGCCGGCGGCGGCAGAAAGCACCCCAGA |
| | | TACAGATGCAGAAGCATGGGCTTCCCCAAGCACTGCGGCAACGGCACCGTGGCCATGGC |
| | | CGAGTGGGACGCCTTCTGCGAGGAGCAGGTGCTGGACCTGCTGGGCGACGCCGAGAGAC |
| | | TGGAGAAGGTGTGGGTGGCCGGCAGCGACAGCGCCGTGGAGCTGGCCGAGGTGAACGCC |
| | | GAGCTGGTGGACCTGACCAGCCTGATCGGCAGCCCCGCCTACAGAGCCGGCAGCCCCCA |
| | | GAGAGAGGCCCTGGACGCCAGAATCGCCGCCCTGGCCGCCAGACAGGAGGAGCTGGAGG |
| | | GCCTGGAGGCCAGACCCAGCGGCTGGGAGTGGAGAGAGACCGGCCAGAGATTCGGCGAC |
| | | TGGTGGAGAGAGCAGGACACCGCCGCCAAGAACACCTGGCTGAGAAGCATGAACGTGAG |
| | | ACTGACCTTCGACGTGAGAGGCGGCCTGACCAGAACCATCGACTTCGGCGACCTGCAGG |
| | | AGTACGAGCAGCACCTGAGACTGGGCAGCGTGGTGGAGAGACTGCACACCGGCATGAGC |
| | | TGA |
| 623 | PL1383 | tcgcgcgtttcggtgatgacggtgaaaacctctgacacatgcagctcccggagacggtc |
| | | acagcttgtctgtaagcggatgccgggagcagacaagcccgtcagggcgcgtcagcggg |
| | | tgttggcgggtgtcggggctggcttaactatgcggcatcagagcagattgtactgagag |
| | | tgcaccatatgcggtgtgaaataccgcacagatgcgtaaggagaaaataccgcatcagg |
| | | cgccattcgccattcaggctgcgcaactgttgggaagggcgatcggtgcgggcctcttc |
| | | gctattacgccagctggcgaaagggggatgtgctgcaaggcgattaagttgggtaacgc |
| | | cagggttttcccagtcacgacgttgtaaaacgacggccagagaattcgagctcggtacc |
| | | TAATACGACTCACTATAGAGAATAAACTAGTATTCTTCTGGTCCCCACAGACTCAGAGA |
| | | GAACCCGCCACCATGCCCAAGAAGAAGAGAAAGGTGTACCCCTACGACGTGCCCGACTA |
| | | CGCCGGCAGCAGAGCCCTGGTGGTGATCAGACTGAGCAGAGTGACCGACGCCACCACCA |
| | | GCCCCGAGAGACAGCTGGAGAGCTGCCAGCAGCTGTGCGCCCAGAGAGGCTGGGACGTG |
| | | GTGGGCGTGGCCGAGGACCTGGACGTGAGCGGCGCCGTGGACCCCTTCGACAGAAAGAG |
| | | AAGACCCAACCTGGCCAGATGGCTGGCCTTCGAGGAGCAGCCCTTCGACGTGATCGTGG |
| | | CCTACAGAGTGGACAGACTGACCAGAAGCATCAGACACCTGCAGCAGCTGGTGCACTGG |
| | | GCCGAGGACCACAAGAAGCTGGTGGTGAGCGCCACCGAGGCCCACTTCGACACCACCAC |
| | | CCCCTTCGCCGCCGTGGTGATCGCCCTGATGGGCACCGTGGCCCAGATGGAGCTGGAGG |
| | | CCATCAAGGAGAGAAACAGAAGCGCCGCCCACTTCAACATCAGAGCCGGCAAGTACAGA |
| | | GGCAGCCTGCCCCCCTGGGGCTACCTGCCCACCAGAGTGGACGGCGAGTGGAGACTGGT |
| | | GCCCGACCCCGTGCAGAGAGAGAGAATCCTGGAGGTGTACCACAGAGTGGTGGACAACC |
| | | ACGAGCCCCTGCACCTGGTGGCCCACGACCTGAACAGAAGAGGCGTGCTGAGCCCCAAG |
| | | GACTACTTCGCCCAGCTGCAGGGCAGAGAGCCCCAGGGCAGAGAGTGGAGCGCCACCGC |
| | | CCTGAAGAGAAGCATGATCAGCGAGGCCATGCTGGGCTACGCCACCCTGAACGGCAAGA |
| | | CCGTGAGAGACGACGACGGCGCCCCCCTGGTGAGAGCCGAGCCCATCCTGACCAGAGAG |
| | | CAGCTGGAGGCCCTGAGAGCCGAGCTGGTGAAGACCAGCAGAGCCAAGCCCGCCGTGAG |
| | | CACCCCCAGCCTGCTGCTGAGAGTGCTGTTCTGCGCCGTGTGCGGCGAGCCCGCCTACA |
| | | AGTTCGCCGGCGGCGGCAGAAAGCACCCCAGATACAGATGCAGAAGCATGGGCTTCCCC |
| | | AAGCACTGCGGCAACGGCACCGTGGCCATGGCCGAGTGGGACGCCTTCTGCGAGGAGCA |
| | | GGTGCTGGACCTGCTGGGCGACGCCGAGAGACTGGAGAAGGTGTGGGTGGCCGGCAGCG |
| | | ACAGCGCCGTGGAGCTGGCCGAGGTGAACGCCGAGCTGGTGGACCTGACCAGCCTGATC |
| | | GGCAGCCCCGCCTACAGAGCCGGCAGCCCCCAGAGAGAGGCCCTGGACGCCAGAATCGC |
| | | CGCCCTGGCCGCCAGACAGGAGGAGCTGGAGGGCCTGGAGGCCAGACCCAGCGGCTGGG |
| | | AGTGGAGAGAGACCGGCCAGAGATTCGGCGACTGGTGGAGAGAGCAGGACACCGCCGCC |
| | | AAGAACACCTGGCTGAGAAGCATGAACGTGAGACTGACCTTCGACGTGAGAGGCGGCCT |
| | | GACCAGAACCATCGACTTCGGCGACCTGCAGGAGTACGAGCAGCACCTGAGACTGGGCA |
| | | GCGTGGTGGAGAGACTGCACACCGGCATGAGCTGATAACTCGAGCTGGTACTGCATGCA |
| | | CGCAATGCTAGCTGCCCCTTTCCCGTCCTGGGTACCCCGAGTCTCCCCCGACCTCGGGT |
| | | CCCAGGTATGCTCCCACCTCCACCTGCCCCACTCACCACCTCTGCTAGTTCCAGACACC |
| | | TCCCAAGCACGCAGCAATGCAGCTCAAAACGCTTAGCCTAGCCACACCCCCACGGGAAA |
| | | CAGCAGTGATTAACCTTTAGCAATAAACGAAAGTTTAACTAAGCTATACTAACCCCAGG |
| | | GTTGGTCAATTTCGTGCCAGCCACACCCTGGAGCTAGCAAAAAAAAAAAAAAAAAAAAA |
| | | AAAAAAAAAgcatatgactAAAAAAAAAAAAAAAAAAAAAAAAAAAAAAAAAAAAAAAA |
| | | AAAAAAAAAAAAAAAAAAAAAAAAAAAAAAtgaagagcaggcctgcatgcaagcttcta |
| | | gcataaccccttggggcctctaaacgggtcttgaggggttttttgggtgtaatcatggt |
| | | catagctgtttcctgtgtgaacagcctggggctcaccttcggggggcctttctgcgggt |
| | | gcctaatgagtgagctaactcacattaattgcgttgcgctcactgcccgctttccagtc |
| | | gggaaacctgtcgtgccagctgcattaatgaatcggccaacgcgcggggagaggcggtt |
| | | tgcgtattgggcgccgaagaaaggcccacccgtgaaggtgagcctcttccgcttcctcg |
| | | ctcactgactcgctgcgctcggtcgttcggctgcggcgagcggtatcagctcactcaaa |
| | | ggcggtaatacggttatccacagaatcaggggataacgcaggaaagaacatgtgagcaa |
| | | aaggccagcaaaaggccaggaaccgtaaaaaggccgcgttgctggcgtttttccatagg |
| | | ctccgcccccctgacgagcatcacaaaaatcgacgctcaagtcagaggtggcgaaaccc |
| | | gacaggactataaagataccaggcgtttccccctggaagctccctcgtgcgctctcctg |
| | | ttccgaccctgccgcttaccggatacctgtccgcctttctcccttcgggaagcgtggcg |
| | | ctttctcatagctcacgctgtaggtatctcagttcggtgtaggtcgttcgctccaagct |
| | | gggctgtgtgcacgaaccccccgttcagcccgaccgctgcgccttatccggtaactatc |
| | | gtcttgagtccaacccggtaagacacgacttatcgccactggcagcagccactggtaac |
| | | aggattagcagagcgaggtatgtaggcggtgctacagagttcttgaagtggtggcctaa |
| | | ctacggctacactagaagaacagtatttggtatctgcgctctgctgaagccagttacct |
| | | tcggaaaaagagttggtagctcttgatccggcaaacaaaccaccgctggtagcggtggt |
| | | ttttttgtttgcaagcagcagattacgcgcagaaaaaaaggatctcaagaagatccttt |
| | | gatcttttctacggggtctgacgctcagtggaacgaaaactcacgttaagggattttgg |
| | | tcatgagattatcaaaaaggatcttcacctagatccttttaaattaaaaatgaagtttt |
| | | aaatcaagcccaatctgaataatgttacaaccaattaaccaattctgattagaaaaact |
| | | catcgagcatcaaatgaaactgcaatttattcatatcaggattatcaataccatatttt |
| | | tgaaaaagccgtttctgtaatgaaggagaaaactcaccgaggcagttccataggatggc |
| | | aagatcctggtatcggtctgcgattccgactcgtccaacatcaatacaacctattaatt |
| | | tcccctcgtcaaaaataaggttatcaagtgagaaatcaccatgagtgacgactgaatcc |
| | | ggtgagaatggcaaaagtttatgcatttctttccagacttgttcaacaggccagccatt |
| | | acgctcgtcatcaaaatcactcgcatcaaccaaaccgttattcattcgtgattgcgcct |
| | | gagcgagacgaaatacgcgatcgctgttaaaaggacaattacaaacaggaatcgaatgc |
| | | aaccggcgcaggaacactgccagcgcatcaacaatattttcacctgaatcaggatattc |
| | | ttctaatacctggaatgctgtttttccggggatcgcagtggtgagtaaccatgcatcat |
| | | caggagtacggataaaatgcttgatggtcggaagaggcataaattccgtcagccagttt |
| | | agtctgaccatctcatctgtaacatcattggcaacgctacctttgccatgtttcagaaa |
| | | caactctggcgcatcgggcttcccatacaagcgatagattgtcgcacctgattgcccga |
| | | cattatcgcgagcccatttatacccatataaatcagcatccatgttggaatttaatcgc |
| | | ggcctcgacgtttcccgttgaatatggctcataacaccccttgtattactgtttatgta |
| | | agcagacagttttattgttcatgatgatatatttttatcttgtgcaatgtaacatcaga |
| | | gattttgagacacgggccagagctgca |
| 624 | PL1409 | tcgcgcgtttcggtgatgacggtgaaaacctctgacacatgcagctcccggagacggtc |
| | | acagcttgtctgtaagcggatgccgggagcagacaagcccgtcagggcgcgtcagcggg |
| | | tgttggcgggtgtcggggctggcttaactatgcggcatcagagcagattgtactgagag |
| | | tgcaccatatgcggtgtgaaataccgcacagatgcgtaaggagaaaataccgcatcagg |
| | | cgccattcgccattcaggctgcgcaactgttgggaagggcgatcggtgcgggcctcttc |
| | | gctattacgccagctggcgaaagggggatgtgctgcaaggcgattaagttgggtaacgc |
| | | cagggttttcccagtcacgacgttgtaaaacgacggccagagaattcgagctcggtacc |
| | | TAATACGACTCACTATAGAGAATAAACTAGTATTCTTCTGGTCCCCACAGACTCAGAGA |
| | | GAACCCGCCACCATGCCAAAGAAGAAGCGAAAGGTGTATCCCTACGACGTGCCCGACTA |
| | | CGCCGGTAGTCGGGCACTCGTAGTGATACGCCTTTCGCGGGTCACTGATGCAACGACGA |
| | | GTCCAGAGCGTCAGCTGGAATCCTGTCAGCAGCTATGCGCGCAGAGGGGCTGGGACGTG |
| | | GTCGGCGTGGCTGAGGATTTGGACGTCTCTGGTGCGGTCGATCCCTTCGACCGCAAGAG |
| | | ACGTCCAAACCTCGCCCGCTGGCTCGCGTTCGAGGAGCAGCCCTTCGACGTGATAGTTG |
| | | CTTACAGGGTTGACCGGCTGACGCGCTCGATTCGTCACTTGCAGCAGTTGGTCCACTGG |
| | | GCGGAGGACCACAAGAAGCTTGTGGTCTCCGCCACAGAGGCCCACTTCGACACCACGAC |
| | | GCCCTTCGCGGCAGTGGTGATCGCCTTGATGGGCACTGTAGCTCAGATGGAGCTAGAGG |
| | | CCATCAAGGAGCGGAACCGGAGCGCCGCTCACTTCAACATCCGGGCGGGCAAGTACCGA |
| | | GGGAGTCTGCCTCCCTGGGGTTACTTGCCCACCCGGGTGGATGGTGAGTGGCGCCTGGT |
| | | TCCGGACCCTGTCCAGAGGGAGCGGATCTTGGAGGTCTACCACCGTGTGGTAGACAACC |
| | | ATGAGCCGCTCCATCTGGTGGCCCACGATCTCAATCGGCGCGGAGTGCTGTCGCCCAAG |
| | | GACTACTTCGCCCAGCTCCAGGGGGGGGAGCCCCAGGGGGGGGAGTGGTCCGCGACAGC |
| | | ACTCAAGCGCTCGATGATATCGGAGGCCATGCTCGGCTACGCAACGCTTAACGGCAAGA |
| | | CTGTTCGCGATGACGATGGGGCTCCGCTCGTGAGAGCGGAGCCCATTCTCACTCGCGAG |
| | | CAGCTTGAAGCGTTGCGAGCCGAGCTGGTGAAGACATCGCGGGCTAAGCCCGCGGTGTC |
| | | TACACCATCTTTGTTGCTTCGGGTCCTCTTCTGCGCTGTATGCGGGGAGCCCGCATACA |
| | | AGTTCGCAGGAGGGGGCCGGAAGCACCCACGGTACCGTTGCCGCAGTATGGGTTTTCCC |
| | | AAGCACTGCGGCAACGGTACCGTGGCCATGGCTGAGTGGGACGCCTTCTGCGAGGAGCA |
| | | AGTGCTGGATCTGCTCGGCGACGCCGAGCGCCTGGAGAAGGTGTGGGTCGCCGGGTCAG |
| | | ATTCAGCAGTTGAACTCGCAGAGGTGAACGCTGAGCTCGTGGACCTCACCTCGCTAATC |
| | | GGGAGTCCAGCGTATCGCGCGGGGTCTCCCCAGCGCGAGGCGCTGGACGCCCGAATAGC |
| | | GGCGCTGGCCGCCCGCCAGGAGGAGCTGGAGGGCCTGGAGGCCAGGCCCTCCGGCTGGG |
| | | AGTGGCGGGAGACCGGCCAGCGCTTCGGAGATTGGTGGCGCGAGCAGGACACCGCAGCC |
| | | AAGAACACTTGGCTGCGGTCCATGAACGTGCGGCTAACCTTCGACGTGCGCGGGGGCTT |
| | | GACCCGGACCATCGACTTCGGTGACCTTCAGGAGTATGAACAGCACCTGAGGTTGGGGT |
| | | CCGTGGTCGAGCGCCTGCACACGGGGATGAGCTGATAACTCGAGCTGGTACTGCATGCA |
| | | CGCAATGCTAGCTGCCCCTTTCCCGTCCTGGGTACCCCGAGTCTCCCCCGACCTCGGGT |
| | | CCCAGGTATGCTCCCACCTCCACCTGCCCCACTCACCACCTCTGCTAGTTCCAGACACC |
| | | TCCCAAGCACGCAGCAATGCAGCTCAAAACGCTTAGCCTAGCCACACCCCCACGGGAAA |
| | | CAGCAGTGATTAACCTTTAGCAATAAACGAAAGTTTAACTAAGCTATACTAACCCCAGG |
| | | GTTGGTCAATTTCGTGCCAGCCACACCCTGGAGCTAGCAAAAAAAAAAAAAAAAAAAAA |
| | | AAAAAAAAAgcatatgactAAAAAAAAAAAAAAAAAAAAAAAAAAAAAAAAAAAAAAAA |
| | | AAAAAAAAAAAAAAAAAAAAAAAAAAAAAAtgaagagcaggcctgcatgcaagcttcta |
| | | gcataaccccttggggcctctaaacgggtcttgaggggttttttgggtgtaatcatggt |
| | | catagctgtttcctgtgtgaacagcctggggctcaccttcgggtgggcctttctgcggg |
| | | tgcctaatgagtgagctaactcacattaattgcgttgcgctcactgcccgctttccagt |
| | | cgggaaacctgtcgtgccagctgcattaatgaatcggccaacgcgcggggagaggcggt |
| | | ttgcgtattgggcgccgaagaaaggcccacccgtgaaggtgagcctcttccgcttcctc |
| | | gctcactgactcgctgcgctcggtcgttcggctgcggcgagcggtatcagctcactcaa |
| | | aggcggtaatacggttatccacagaatcaggggataacgcaggaaagaacatgtgagca |
| | | aaaggccagcaaaaggccaggaaccgtaaaaaggccgcgttgctggcgtttttccatag |
| | | gctccgcccccctgacgagcatcacaaaaatcgacgctcaagtcagaggtggcgaaacc |
| | | cgacaggactataaagataccaggcgtttccccctggaagctccctcgtgcgctctcct |
| | | gttccgaccctgccgcttaccggatacctgtccgcctttctcccttcgggaagcgtggc |
| | | gctttctcatagctcacgctgtaggtatctcagttcggtgtaggtcgttcgctccaagc |
| | | tgggctgtgtgcacgaaccccccgttcagcccgaccgctgcgccttatccggtaactat |
| | | cgtcttgagtccaacccggtaagacacgacttatcgccactggcagcagccactggtaa |
| | | caggattagcagagcgaggtatgtaggcggtgctacagagttcttgaagtggtggccta |
| | | actacggctacactagaagaacagtatttggtatctgcgctctgctgaagccagttacc |
| | | ttcggaaaaagagttggtagctcttgatccggcaaacaaaccaccgctggtagcggtgg |
| | | tttttttgtttgcaagcagcagattacgcgcagaaaaaaaggatctcaagaagatcctt |
| | | tgatcttttctacggggtctgacgctcagtggaacgaaaactcacgttaagggattttg |
| | | gtcatgagattatcaaaaaggatcttcacctagatccttttaaattaaaaatgaagttt |
| | | taaatcaagcccaatctgaataatgttacaaccaattaaccaattctgattagaaaaac |
| | | tcatcgagcatcaaatgaaactgcaatttattcatatcaggattatcaataccatattt |
| | | ttgaaaaagccgtttctgtaatgaaggagaaaactcaccgaggcagttccataggatgg |
| | | caagatcctggtatcggtctgcgattccgactcgtccaacatcaatacaacctattaat |
| | | ttcccctcgtcaaaaataaggttatcaagtgagaaatcaccatgagtgacgactgaatc |
| | | cggtgagaatggcaaaagtttatgcatttctttccagacttgttcaacaggccagccat |
| | | tacgctcgtcatcaaaatcactcgcatcaaccaaaccgttattcattcgtgattgcgcc |
| | | tgagcgagacgaaatacgcgatcgctgttaaaaggacaattacaaacaggaatcgaatg |
| | | caaccggcgcaggaacactgccagcgcatcaacaatattttcacctgaatcaggatatt |
| | | cttctaatacctggaatgctgtttttccggggatcgcagtggtgagtaaccatgcatca |
| | | tcaggagtacggataaaatgcttgatggtcggaagaggcataaattccgtcagccagtt |
| | | tagtctgaccatctcatctgtaacatcattggcaacgctacctttgccatgtttcagaa |
| | | acaactctggcgcatcgggcttcccatacaagcgatagattgtcgcacctgattgcccg |
| | | acattatcgcgagcccatttatacccatataaatcagcatccatgttggaatttaatcg |
| | | cggcctcgacgtttcccgttgaatatggctcataacaccccttgtattactgtttatgt |
| | | aagcagacagttttattgttcatgatgatatatttttatcttgtgcaatgtaacatcag |
| | | agattttgagacacgggccagagctgca |
| 625 | PL1709 | MPKKKRKVQPRFAAAGSGKDKKSDGKDSQKKGSGRALVVIRLSRVTDATTSPERQLESC |
| | _AA | QQLCAQRGWDVVGVAEDLDVSGAVDPFDRKRRPNLARWLAFEEQPFDVIVAYRVDRLTR |
| | | SIRHLQQLVHWAEDHKKLVVSATEAHFDTTTPFAAVVIALMGTVAQMELEAIKERNRSA |
| | | AHFNIRAGKYRGSLPPWGYLPTRVDGEWRLVPDPVQRERILEVYHRVVDNHEPLHLVAH |
| | | DLNRRGVLSPKDYFAQLQGREPQGREWSATALKRSMISEAMLGYATLNGKTVRDDDGAP |
| | | LVRAEPILTREQLEALRAELVKTSRAKPAVSTPSLLLRVLFCAVCGEPAYKFAGGGRKH |
| | | PRYRCRSMGFPKHCGNGTVAMAEWDAFCEEQVLDLLGDAERLEKVWVAGSDSAVELAEV |
| | | NAELVDLTSLIGSPAYRAGSPQREALDARIAALAARQEELEGLEARPSGWEWRETGQRF |
| | | GDWWREQDTAAKNTWLRSMNVRLTFDVRGGLTRTIDFGDLQEYEQHLRLGSWERLHTGM |
| | | S* |
| 626 | PL1709_ | ATGCCCAAGAAGAAGAGAAAGGTGCAACCGCGGTTCGCGGCCGCTGGCAGCGGCAAGGA |
| | DNA | CAAGAAATCCGATGGCAAGGACAGCCAGAAAAAAGGCAGCGGCAGAGCCCTGGTGGTGA |
| | | TCAGACTGAGCAGAGTGACCGACGCCACCACCAGCCCCGAGAGACAGCTGGAGAGCTGC |
| | | CAGCAGCTGTGCGCCCAGAGAGGCTGGGACGTGGTGGGCGTGGCCGAGGACCTGGACGT |
| | | GAGCGGCGCCGTGGACCCCTTCGACAGAAAGAGAAGACCCAACCTGGCCAGATGGCTGG |
| | | CCTTCGAGGAGCAGCCCTTCGACGTGATCGTGGCCTACAGAGTGGACAGACTGACCAGA |
| | | AGCATCAGACACCTGCAGCAGCTGGTGCACTGGGCCGAGGACCACAAGAAGCTGGTGGT |
| | | GAGCGCCACCGAGGCCCACTTCGACACCACCACCCCCTTCGCCGCCGTGGTGATCGCCC |
| | | TGATGGGCACCGTGGCCCAGATGGAGCTGGAGGCCATCAAGGAGAGAAACAGAAGCGCC |
| | | GCCCACTTCAACATCAGAGCCGGCAAGTACAGAGGCAGCCTGCCCCCCTGGGGCTACCT |
| | | GCCCACCAGAGTGGACGGCGAGTGGAGACTGGTGCCCGACCCCGTGCAGAGAGAGAGAA |
| | | TCCTGGAGGTGTACCACAGAGTGGTGGACAACCACGAGCCCCTGCACCTGGTGGCCCAC |
| | | GACCTGAACAGAAGAGGCGTGCTGAGCCCCAAGGACTACTTCGCCCAGCTGCAGGGCAG |
| | | AGAGCCCCAGGGCAGAGAGTGGAGCGCCACCGCCCTGAAGAGAAGCATGATCAGCGAGG |
| | | CCATGCTGGGCTACGCCACCCTGAACGGCAAGACCGTGAGAGACGACGACGGCGCCCCC |
| | | CTGGTGAGAGCCGAGCCCATCCTGACCAGAGAGCAGCTGGAGGCCCTGAGAGCCGAGCT |
| | | GGTGAAGACCAGCAGAGCCAAGCCCGCCGTGAGCACCCCCAGCCTGCTGCTGAGAGTGC |
| | | TGTTCTGCGCCGTGTGCGGCGAGCCCGCCTACAAGTTCGCCGGCGGCGGCAGAAAGCAC |
| | | CCCAGATACAGATGCAGAAGCATGGGCTTCCCCAAGCACTGCGGCAACGGCACCGTGGC |
| | | CATGGCCGAGTGGGACGCCTTCTGCGAGGAGCAGGTGCTGGACCTGCTGGGCGACGCCG |
| | | AGAGACTGGAGAAGGTGTGGGTGGCCGGCAGCGACAGCGCCGTGGAGCTGGCCGAGGTG |
| | | AACGCCGAGCTGGTGGACCTGACCAGCCTGATCGGCAGCCCCGCCTACAGAGCCGGCAG |
| | | CCCCCAGAGAGAGGCCCTGGACGCCAGAATCGCCGCCCTGGCCGCCAGACAGGAGGAGC |
| | | TGGAGGGCCTGGAGGCCAGACCCAGCGGCTGGGAGTGGAGAGAGACCGGCCAGAGATTC |
| | | GGCGACTGGTGGAGAGAGCAGGACACCGCCGCCAAGAACACCTGGCTGAGAAGCATGAA |
| | | CGTGAGACTGACCTTCGACGTGAGAGGCGGCCTGACCAGAACCATCGACTTCGGCGACC |
| | | TGCAGGAGTACGAGCAGCACCTGAGACTGGGCAGCGTGGTGGAGAGACTGCACACCGGC |
| | | ATGAGCTGA |
| 627 | PL1929 | MKRTADGSEFESPKKKRKVDKKYSIGLDIGTNSVGWAVITDEYKVPSKKFKVLGNTDRH |
| | _AA | SIKKNLIGALLFDSGETAEATRLKRTARRRYTRRKNRICYLQEIFSNEMAKVDDSFFHR |
| | | LEESFLVEEDKKHERHPIFGNIVDEVAYHEKYPTIYHLRKKLVDSTDKADLRLIYLALA |
| | | HMIKFRGHFLIEGDLNPDNSDVDKLFIQLVQTYNQLFEENPINASGVDAKAILSARLSK |
| | | SRRLENLIAQLPGEKKNGLFGNLIALSLGLTPNFKSNFDLAEDAKLQLSKDTYDDDLDN |
| | | LLAQIGDQYADLFLAAKNLSDAILLSDILRVNTEITKAPLSASMIKRYDEHHQDLTLLK |
| | | ALVRQQLPEKYKEIFFDQSKNGYAGYIDGGASQEEFYKFIKPILEKMDGTEELLVKLNR |
| | | EDLLRKQRTFDNGSIPHQIHLGELHAILRRQEDFYPFLKDNREKIEKILTFRIPYYVGP |
| | | LARGNSRFAWMTRKSEETITPWNFEEVVDKGASAQSFIERMTNFDKNLPNEKVLPKHSL |
| | | LYEYFTVYNELTKVKYVTEGMRKPAFLSGEQKKAIVDLLFKTNRKVTVKQLKEDYFKKI |
| | | ECFDSVEISGVEDRFNASLGTYHDLLKIIKDKDFLDNEENEDILEDIVLTLTLFEDREM |
| | | IEERLKTYAHLFDDKVMKQLKRRRYTGWGRLSRKLINGIRDKQSGKTILDFLKSDGFAN |
| | | RNFMQLIHDDSLTFKEDIQKAQVSGQGDSLHEHIANLAGSPAIKKGILQTVKVVDELVK |
| | | VMGRHKPENIVIEMARENQTTQKGQKNSRERMKRIEEGIKELGSQILKEHPVENTQLQN |
| | | EKLYLYYLQNGRDMYVDQELDINRLSDYDVDAIVPQSFLKDDSIDNKVLTRSDKNRGKS |
| | | DNVPSEEVVKKMKNYWRQLLNAKLITQRKFDNLTKAERGGLSELDKAGFIKRQLVETRQ |
| | | ITKHVAQILDSRMNTKYDENDKLIREVKVITLKSKLVSDFRKDFQFYKVREINNYHHAH |
| | | DAYLNAVVGTALIKKYPKLESEFVYGDYKVYDVRKMIAKSEQEIGKATAKYFFYSNIMN |
| | | FFKTEITLANGEIRKRPLIETNGETGEIVWDKGRDFATVRKVLSMPQVNIVKKTEVQTG |
| | | GFSKESILPKRNSDKLIARKKDWDPKKYGGFDSPTVAYSVLVVAKVEKGKSKKLKSVKE |
| | | LLGITIMERSSFEKNPIDFLEAKGYKEVKKDLIIKLPKYSLFELENGRKRMLASAGELQ |
| | | KGNELALPSKYVNFLYLASHYEKLKGSPEDNEQKQLFVEQHKHYLDEIIEQISEFSKRV |
| | | ILADANLDKVLSAYNKHRDKPIREQAENIIHLFTLTNLGAPAAFKYFDTTIDRKRYTST |
| | | KEVLDATLIHQSITGLYETRIDLSQLGGDSGGSSGGSSGSETPGTSESATPESSGGSSG |
| | | GSSTLNIEDEYRLHETSKEPDVSLGSTWLSDFPQAWAETGGMGLAVRQAPLIIPLKATS |
| | | TPVSIKQYPMSQEARLGIKPHIQRLLDQGILVPCQSPWNTPLLPVKKPGTNDYRPVQDL |
| | | REVNKRVEDIHPTVPNPYNLLSGLPPSHQWYTVLDLKDAFFCLRLHPTSQPLFAFEWRD |
| | | PEMGISGQLTWTRLPQGFKNSPTLFNEALHRDLADFRIQHPDLILLQYVDDLLLAATSE |
| | | LDCQQGTRALLQTLGNLGYRASAKKAQICQKQVKYLGYLLKEGQRWLTEARKETVMGQP |
| | | TPKTPRQLREFLGKAGFCRLFIPGFAEMAAPLYPLTKPGTLFNWGPDQQKAYQEIKQAL |
| | | LTAPALGLPDLTKPFELFVDEKQGYAKGVLTQKLGPWRRPVAYLSKKLDPVAAGWPPCL |
| | | RMVAAIAVLTKDAGKLTMGQPLVILAPHAVEALVKQPPDRWLSNARMTHYQALLLDTDR |
| | | VQFGPVVALNPATLLPLPEEGLQHNCLDILAEAHGTRPDLTDQPLPDADHTWYTDGSSL |
| | | LQEGQRKAGAAVTTETEVIWAKALPAGTSAQRAELIALTQALKMAEGKKLNVYTDSRYA |
| | | FATAHIHGEIYRRRGWLTSEGKEIKNKDEILALLKALFLPKRLSIIHCPGHQKGHSAEA |
| | | RGNRMADQAARKAAITETPDTSTLLIENSSPSGGSKRTADGSEFEPKKKRKVGSGATNF |
| | | SLLKQAGDVEENPGPPAAKRVKLDGGSRALVVIRLSRVTDATTSPERQLESCQQLCAQR |
| | | GWDVVGVAEDLDVSGAVDPFDRKRRPNLARWLAFEEQPFDVIVAYRVDRLTRSIRHLQQ |
| | | LVHWAEDHKKLVVSATEAHFDTTTPFAAVVIALMGTVAQMELEAIKERNRSAAHFNIRA |
| | | GKYRGSLPPWGYLPTRVDGEWRLVPDPVQRERILEVYHRVVDNHEPLHLVAHDLNRRGV |
| | | LSPKDYFAQLQGREPQGREWSATALKRSMISEAMLGYATLNGKTVRDDDGAPLVRAEPI |
| | | LTREQLEALRAELVKTSRAKPAVSTPSLLLRVLFCAVCGEPAYKFAGGGRKHPRYRCRS |
| | | MGFPKHCGNGTVAMAEWDAFCEEQVLDLLGDAERLEKVWVAGSDSAVELAEVNAELVDL |
| | | TSLIGSPAYRAGSPQREALDARIAALAARQEELEGLEARPSGWEWRETGQRFGDWWREQ |
| | | DTAAKNTWLRSMNVRLTFDVRGGLTRTIDFGDLQEYEQHLRLGSWVERLHTGMSGGSPK |
| | | KKRKV* |
| 628 | PL1929_ | ATGAAGAGAACCGCCGACGGCAGCGAGTTCGAGAGCCCCAAGAAGAAGAGAAAGGTGGA |
| | DNA | CAAGAAGTACAGCATCGGCCTGGACATCGGCACCAACAGCGTGGGCTGGGCCGTGATCA |
| | | CCGACGAGTACAAGGTGCCCAGCAAGAAGTTCAAGGTGCTGGGCAACACCGACAGACAC |
| | | AGCATCAAGAAGAACCTGATCGGCGCCCTGCTGTTCGACAGCGGCGAGACCGCCGAGGC |
| | | CACCAGACTGAAGAGAACCGCCAGAAGAAGATACACCAGAAGAAAGAACAGAATCTGCT |
| | | ACCTGCAGGAGATCTTCAGCAACGAGATGGCCAAGGTGGACGACAGCTTCTTCCACAGA |
| | | CTGGAGGAGAGCTTCCTGGTGGAGGAGGACAAGAAGCACGAGAGACACCCCATCTTCGG |
| | | CAACATCGTGGACGAGGTGGCCTACCACGAGAAGTACCCCACCATCTACCACCTGAGAA |
| | | AGAAGCTGGTGGACAGCACCGACAAGGCCGACCTGAGACTGATCTACCTGGCCCTGGCC |
| | | CACATGATCAAGTTCAGAGGCCACTTCCTGATCGAGGGCGACCTGAACCCCGACAACAG |
| | | CGACGTGGACAAGCTGTTCATCCAGCTGGTGCAGACCTACAACCAGCTGTTCGAGGAGA |
| | | ACCCCATCAACGCCAGCGGCGTGGACGCCAAGGCCATCCTGAGCGCCAGACTGAGCAAG |
| | | AGCAGAAGACTGGAGAACCTGATCGCCCAGCTGCCCGGCGAGAAGAAGAACGGCCTGTT |
| | | CGGCAACCTGATCGCCCTGAGCCTGGGCCTGACCCCCAACTTCAAGAGCAACTTCGACC |
| | | TGGCCGAGGACGCCAAGCTGCAGCTGAGCAAGGACACCTACGACGACGACCTGGACAAC |
| | | CTGCTGGCCCAGATCGGCGACCAGTACGCCGACCTGTTCCTGGCCGCCAAGAACCTGAG |
| | | CGACGCCATCCTGCTGAGCGACATCCTGAGAGTGAACACCGAGATCACCAAGGCCCCCC |
| | | TGAGCGCCAGCATGATCAAGAGATACGACGAGCACCACCAGGACCTGACCCTGCTGAAG |
| | | GCCCTGGTGAGACAGCAGCTGCCCGAGAAGTACAAGGAGATCTTCTTCGACCAGAGCAA |
| | | GAACGGCTACGCCGGCTACATCGACGGCGGCGCCAGCCAGGAGGAGTTCTACAAGTTCA |
| | | TCAAGCCCATCCTGGAGAAGATGGACGGCACCGAGGAGCTGCTGGTGAAGCTGAACAGA |
| | | GAGGACCTGCTGAGAAAGCAGAGAACCTTCGACAACGGCAGCATCCCCCACCAGATCCA |
| | | CCTGGGCGAGCTGCACGCCATCCTGAGAAGACAGGAGGACTTCTACCCCTTCCTGAAGG |
| | | ACAACAGAGAGAAGATCGAGAAGATCCTGACCTTCAGAATCCCCTACTACGTGGGCCCC |
| | | CTGGCCAGAGGCAACAGCAGATTCGCCTGGATGACCAGAAAGAGCGAGGAGACCATCAC |
| | | CCCCTGGAACTTCGAGGAGGTGGTGGACAAGGGCGCCAGCGCCCAGAGCTTCATCGAGA |
| | | GAATGACCAACTTCGACAAGAACCTGCCCAACGAGAAGGTGCTGCCCAAGCACAGCCTG |
| | | CTGTACGAGTACTTCACCGTGTACAACGAGCTGACCAAGGTGAAGTACGTGACCGAGGG |
| | | CATGAGAAAGCCCGCCTTCCTGAGCGGCGAGCAGAAGAAGGCCATCGTGGACCTGCTGT |
| | | TCAAGACCAACAGAAAGGTGACCGTGAAGCAGCTGAAGGAGGACTACTTCAAGAAGATC |
| | | GAGTGCTTCGACAGCGTGGAGATCAGCGGCGTGGAGGACAGATTCAACGCCAGCCTGGG |
| | | CACCTACCACGACCTGCTGAAGATCATCAAGGACAAGGACTTCCTGGACAACGAGGAGA |
| | | ACGAGGACATCCTGGAGGACATCGTGCTGACCCTGACCCTGTTCGAGGACAGAGAGATG |
| | | ATCGAGGAGAGACTGAAGACCTACGCCCACCTGTTCGACGACAAGGTGATGAAGCAGCT |
| | | GAAGAGAAGAAGATACACCGGCTGGGGCAGACTGAGCAGAAAGCTGATCAACGGCATCA |
| | | GAGACAAGCAGAGCGGCAAGACCATCCTGGACTTCCTGAAGAGTGACGGCTTCGCCAAC |
| | | AGAAACTTCATGCAGCTGATCCACGACGACAGCCTGACCTTCAAGGAGGACATCCAGAA |
| | | GGCCCAGGTGAGCGGCCAGGGCGACAGCCTGCACGAGCACATCGCCAACCTGGCCGGCA |
| | | GCCCCGCCATCAAGAAGGGCATCCTGCAGACCGTGAAGGTGGTGGACGAGCTGGTGAAG |
| | | GTGATGGGCAGACACAAGCCCGAGAACATCGTGATCGAGATGGCCAGAGAGAACCAGAC |
| | | CACCCAGAAGGGCCAGAAGAACAGCAGAGAGAGAATGAAGAGAATCGAGGAGGGCATCA |
| | | AGGAGCTGGGCAGCCAGATCCTGAAGGAGCACCCCGTGGAGAACACCCAGCTGCAGAAC |
| | | GAGAAGCTGTACCTGTACTACCTGCAGAACGGCAGAGACATGTACGTGGACCAGGAGCT |
| | | GGACATCAACAGACTGAGCGACTACGACGTGGACGCCATCGTGCCCCAGAGCTTCCTGA |
| | | AGGACGACAGCATCGACAACAAGGTGCTGACCAGAAGCGACAAGAACAGAGGCAAGAGC |
| | | GACAACGTGCCCAGCGAGGAGGTGGTGAAGAAGATGAAGAACTACTGGAGACAGCTGCT |
| | | GAACGCCAAGCTGATCACCCAGAGAAAGTTCGACAACCTGACCAAGGCCGAGAGAGGCG |
| | | GCCTGAGCGAGCTGGACAAGGCCGGCTTCATCAAGAGACAGCTGGTGGAGACCAGACAG |
| | | ATCACCAAGCACGTGGCCCAGATCCTGGACAGCAGAATGAACACCAAGTACGACGAGAA |
| | | CGACAAGCTGATCAGAGAGGTGAAGGTGATCACCCTGAAGAGTAAGCTGGTGAGCGACT |
| | | TCAGAAAGGACTTCCAGTTCTACAAGGTGAGAGAGATCAACAACTACCACCACGCCCAC |
| | | GACGCCTACCTGAACGCCGTGGTGGGCACCGCCCTGATCAAGAAGTACCCCAAGCTGGA |
| | | GAGCGAGTTCGTGTACGGCGACTACAAGGTGTACGACGTGAGAAAGATGATCGCCAAGA |
| | | GCGAGCAGGAGATCGGCAAGGCCACCGCCAAGTACTTCTTCTACAGCAACATCATGAAC |
| | | TTCTTCAAGACCGAGATCACCCTGGCCAACGGCGAGATCAGAAAGAGACCCCTGATCGA |
| | | GACCAACGGCGAGACCGGCGAGATCGTGTGGGACAAGGGCAGAGACTTCGCCACCGTGA |
| | | GAAAGGTGCTGAGCATGCCCCAGGTGAACATCGTGAAGAAGACCGAGGTGCAGACCGGC |
| | | GGCTTCAGCAAGGAGAGCATCCTGCCCAAGAGAAACAGCGACAAGCTGATCGCCAGAAA |
| | | GAAGGACTGGGACCCCAAGAAGTACGGCGGCTTCGACAGCCCCACCGTGGCCTACAGCG |
| | | TGCTGGTGGTGGCCAAGGTGGAGAAGGGCAAGAGCAAGAAGCTGAAGAGTGTGAAGGAG |
| | | CTGCTGGGCATCACCATCATGGAGAGAAGCAGCTTCGAGAAGAACCCCATCGACTTCCT |
| | | GGAGGCCAAGGGCTACAAGGAGGTGAAGAAGGACCTGATCATCAAGCTGCCCAAGTACA |
| | | GCCTGTTCGAGCTGGAGAACGGCAGAAAGAGAATGCTGGCCAGCGCCGGCGAGCTGCAG |
| | | AAGGGCAACGAGCTGGCCCTGCCCAGCAAGTACGTGAACTTCCTGTACCTGGCCAGCCA |
| | | CTACGAGAAGCTGAAGGGCAGCCCCGAGGACAACGAGCAGAAGCAGCTGTTCGTGGAGC |
| | | AGCACAAGCACTACCTGGACGAGATCATCGAGCAGATCAGCGAGTTCAGCAAGAGAGTG |
| | | ATCCTGGCCGACGCCAACCTGGACAAGGTGCTGAGCGCCTACAACAAGCACAGAGACAA |
| | | GCCCATCAGAGAGCAGGCCGAGAACATCATCCACCTGTTCACCCTGACCAACCTGGGCG |
| | | CCCCCGCCGCCTTCAAGTACTTCGACACCACCATCGACAGAAAGAGATACACCAGCACC |
| | | AAGGAGGTGCTGGACGCCACCCTGATCCACCAGAGCATCACCGGCCTGTACGAGACCAG |
| | | AATCGACCTGAGCCAGCTGGGCGGCGACAGCGGCGGCAGCAGCGGCGGCAGCAGCGGCA |
| | | GCGAGACCCCCGGCACCAGCGAGAGCGCCACCCCCGAGAGCAGCGGCGGCAGCAGCGGC |
| | | GGCAGCAGCACCCTGAACATCGAGGACGAGTACAGACTGCACGAGACCAGCAAGGAGCC |
| | | CGACGTGAGCCTGGGCAGCACCTGGCTGAGCGACTTCCCCCAGGCCTGGGCCGAGACCG |
| | | GCGGCATGGGCCTGGCCGTGAGACAGGCCCCCCTGATCATCCCCCTGAAGGCCACCAGC |
| | | ACCCCCGTGAGCATCAAGCAGTACCCCATGAGCCAGGAGGCCAGACTGGGCATCAAGCC |
| | | CCACATCCAGAGACTGCTGGACCAGGGCATCCTGGTGCCCTGCCAGAGCCCCTGGAACA |
| | | CCCCCCTGCTGCCCGTGAAGAAGCCCGGCACCAACGACTACAGACCCGTGCAGGACCTG |
| | | AGAGAGGTGAACAAGAGAGTGGAGGACATCCACCCCACCGTGCCCAACCCCTACAACCT |
| | | GCTGAGCGGCCTGCCCCCCAGCCACCAGTGGTACACCGTGCTGGACCTGAAGGACGCCT |
| | | TCTTCTGCCTGAGACTGCACCCCACCAGCCAGCCCCTGTTCGCCTTCGAGTGGAGAGAC |
| | | CCCGAGATGGGCATCAGCGGCCAGCTGACCTGGACCAGACTGCCCCAGGGCTTCAAGAA |
| | | CAGCCCCACCCTGTTCAACGAGGCCCTGCACAGAGACCTGGCCGACTTCAGAATCCAGC |
| | | ACCCCGACCTGATCCTGCTGCAGTACGTGGACGACCTGCTGCTGGCCGCCACCAGCGAG |
| | | CTGGACTGCCAGCAGGGCACCAGAGCCCTGCTGCAGACCCTGGGCAACCTGGGCTACAG |
| | | AGCCAGCGCCAAGAAGGCCCAGATCTGCCAGAAGCAGGTGAAGTACCTGGGCTACCTGC |
| | | TGAAGGAGGGCCAGAGATGGCTGACCGAGGCCAGAAAGGAGACCGTGATGGGCCAGCCC |
| | | ACCCCCAAGACCCCCAGACAGCTGAGAGAGTTCCTGGGCAAGGCCGGCTTCTGCAGACT |
| | | GTTCATCCCCGGCTTCGCCGAGATGGCCGCCCCCCTGTACCCCCTGACCAAGCCCGGCA |
| | | CCCTGTTCAACTGGGGCCCCGACCAGCAGAAGGCCTACCAGGAGATCAAGCAGGCCCTG |
| | | CTGACCGCCCCCGCCCTGGGCCTGCCCGACCTGACCAAGCCCTTCGAGCTGTTCGTGGA |
| | | CGAGAAGCAGGGCTACGCCAAGGGCGTGCTGACCCAGAAGCTGGGCCCCTGGAGAAGAC |
| | | CCGTGGCCTACCTGAGCAAGAAGCTGGACCCCGTGGCCGCCGGCTGGCCCCCCTGCCTG |
| | | AGAATGGTGGCCGCCATCGCCGTGCTGACCAAGGACGCCGGCAAGCTGACCATGGGCCA |
| | | GCCCCTGGTGATCCTGGCCCCCCACGCCGTGGAGGCCCTGGTGAAGCAGCCCCCCGACA |
| | | GATGGCTGAGCAACGCCAGAATGACCCACTACCAGGCCCTGCTGCTGGACACCGACAGA |
| | | GTGCAGTTCGGCCCCGTGGTGGCCCTGAACCCCGCCACCCTGCTGCCCCTGCCCGAGGA |
| | | GGGCCTGCAGCACAACTGCCTGGACATCCTGGCCGAGGCCCACGGCACCAGACCCGACC |
| | | TGACCGACCAGCCCCTGCCCGACGCCGACCACACCTGGTACACCGACGGCAGCAGCCTG |
| | | CTGCAGGAGGGCCAGAGAAAGGCCGGCGCCGCCGTGACCACCGAGACCGAGGTGATCTG |
| | | GGCCAAGGCCCTGCCCGCCGGCACCAGCGCCCAGAGAGCCGAGCTGATCGCCCTGACCC |
| | | AGGCCCTGAAGATGGCCGAGGGCAAGAAGCTGAACGTGTACACCGACAGCAGATACGCC |
| | | TTCGCCACCGCCCACATCCACGGCGAGATCTACAGAAGAAGAGGCTGGCTGACCAGCGA |
| | | GGGCAAGGAGATCAAGAACAAGGACGAGATCCTGGCCCTGCTGAAGGCCCTGTTCCTGC |
| | | CCAAGAGACTGAGCATCATCCACTGCCCCGGCCACCAGAAGGGCCACAGCGCCGAGGCC |
| | | AGAGGCAACAGAATGGCCGACCAGGCCGCCAGAAAGGCCGCCATCACCGAGACCCCCGA |
| | | CACCAGCACCCTGCTGATCGAGAACAGCAGCCCCAGCGGCGGCAGCAAGAGAACCGCCG |
| | | ACGGCAGCGAGTTCGAGCCCAAGAAGAAGAGAAAGGTGGGCAGCGGCGCCACCAACTTC |
| | | AGCCTGCTGAAGCAGGCCGGCGACGTGGAGGAGAACCCCGGCCCCcctgctgctaagag |
| | | agtgaaactggatggcggcagcAGAGCCCTGGTGGTGATCAGACTGAGCAGAGTGACCG |
| | | ACGCCACCACCAGCCCCGAGAGACAGCTGGAGAGCTGCCAGCAGCTGTGCGCCCAGAGA |
| | | GGCTGGGACGTGGTGGGCGTGGCCGAGGACCTGGACGTGAGCGGCGCCGTGGACCCCTT |
| | | CGACAGAAAGAGAAGACCCAACCTGGCCAGATGGCTGGCCTTCGAGGAGCAGCCCTTCG |
| | | ACGTGATCGTGGCCTACAGAGTGGACAGACTGACCAGAAGCATCAGACACCTGCAGCAG |
| | | CTGGTGCACTGGGCCGAGGACCACAAGAAGCTGGTGGTGAGCGCCACCGAGGCCCACTT |
| | | CGACACCACCACCCCCTTCGCCGCCGTGGTGATCGCCCTGATGGGCACCGTGGCCCAGA |
| | | TGGAGCTGGAGGCCATCAAGGAGAGAAACAGAAGCGCCGCCCACTTCAACATCAGAGCC |
| | | GGCAAGTACAGAGGCAGCCTGCCCCCCTGGGGCTACCTGCCCACCAGAGTGGACGGCGA |
| | | GTGGAGACTGGTGCCCGACCCCGTGCAGAGAGAGAGAATCCTGGAGGTGTACCACAGAG |
| | | TGGTGGACAACCACGAGCCCCTGCACCTGGTGGCCCACGACCTGAACAGAAGAGGCGTG |
| | | CTGAGCCCCAAGGACTACTTCGCCCAGCTGCAGGGCAGAGAGCCCCAGGGCAGAGAGTG |
| | | GAGCGCCACCGCCCTGAAGAGAAGCATGATCAGCGAGGCCATGCTGGGCTACGCCACCC |
| | | TGAACGGCAAGACCGTGAGAGACGACGACGGCGCCCCCCTGGTGAGAGCCGAGCCCATC |
| | | CTGACCAGAGAGCAGCTGGAGGCCCTGAGAGCCGAGCTGGTGAAGACCAGCAGAGCCAA |
| | | GCCCGCCGTGAGCACCCCCAGCCTGCTGCTGAGAGTGCTGTTCTGCGCCGTGTGCGGCG |
| | | AGCCCGCCTACAAGTTCGCCGGCGGCGGCAGAAAGCACCCCAGATACAGATGCAGAAGC |
| | | ATGGGCTTCCCCAAGCACTGCGGCAACGGCACCGTGGCCATGGCCGAGTGGGACGCCTT |
| | | CTGCGAGGAGCAGGTGCTGGACCTGCTGGGCGACGCCGAGAGACTGGAGAAGGTGTGGG |
| | | TGGCCGGCAGCGACAGCGCCGTGGAGCTGGCCGAGGTGAACGCCGAGCTGGTGGACCTG |
| | | ACCAGCCTGATCGGCAGCCCCGCCTACAGAGCCGGCAGCCCCCAGAGAGAGGCCCTGGA |
| | | CGCCAGAATCGCCGCCCTGGCCGCCAGACAGGAGGAGCTGGAGGGCCTGGAGGCCAGAC |
| | | CCAGCGGCTGGGAGTGGAGAGAGACCGGCCAGAGATTCGGCGACTGGTGGAGAGAGCAG |
| | | GACACCGCCGCCAAGAACACCTGGCTGAGAAGCATGAACGTGAGACTGACCTTCGACGT |
| | | GAGAGGCGGCCTGACCAGAACCATCGACTTCGGCGACCTGCAGGAGTACGAGCAGCACC |
| | | TGAGACTGGGCAGCGTGGTGGAGAGACTGCACACCGGCATGAGCGGCGGCAGCCCCAAG |
| | | AAGAAGAGAAAGGTGTGA |
| 629 | PL1930 | MKRTADGSEFESPKKKRKVDKKYSIGLDIGTNSVGWAVITDEYKVPSKKFKVLGNTDRH |
| | _AA | SIKKNLIGALLFDSGETAEATRLKRTARRRYTRRKNRICYLQEIFSNEMAKVDDSFFHR |
| | | LEESFLVEEDKKHERHPIFGNIVDEVAYHEKYPTIYHLRKKLVDSTDKADLRLIYLALA |
| | | HMIKFRGHFLIEGDLNPDNSDVDKLFIQLVQTYNQLFEENPINASGVDAKAILSARLSK |
| | | SRRLENLIAQLPGEKKNGLFGNLIALSLGLTPNFKSNFDLAEDAKLQLSKDTYDDDLDN |
| | | LLAQIGDQYADLFLAAKNLSDAILLSDILRVNTEITKAPLSASMIKRYDEHHQDLTLLK |
| | | ALVRQQLPEKYKEIFFDQSKNGYAGYIDGGASQEEFYKFIKPILEKMDGTEELLVKLNR |
| | | EDLLRKQRTFDNGSIPHQIHLGELHAILRRQEDFYPFLKDNREKIEKILTFRIPYYVGP |
| | | LARGNSRFAWMTRKSEETITPWNFEEVVDKGASAQSFIERMTNFDKNLPNEKVLPKHSL |
| | | LYEYFTVYNELTKVKYVTEGMRKPAFLSGEQKKAIVDLLFKTNRKVTVKQLKEDYFKKI |
| | | ECFDSVEISGVEDRFNASLGTYHDLLKIIKDKDFLDNEENEDILEDIVLTLTLFEDREM |
| | | IEERLKTYAHLFDDKVMKQLKRRRYTGWGRLSRKLINGIRDKQSGKTILDFLKSDGFAN |
| | | RNFMQLIHDDSLTFKEDIQKAQVSGQGDSLHEHIANLAGSPAIKKGILQTVKVVDELVK |
| | | VMGRHKPENIVIEMARENQTTQKGQKNSRERMKRIEEGIKELGSQILKEHPVENTQLQN |
| | | EKLYLYYLQNGRDMYVDQELDINRLSDYDVDAIVPQSFLKDDSIDNKVLTRSDKNRGKS |
| | | DNVPSEEVVKKMKNYWRQLLNAKLITQRKFDNLTKAERGGLSELDKAGFIKRQLVETRQ |
| | | ITKHVAQILDSRMNTKYDENDKLIREVKVITLKSKLVSDFRKDFQFYKVREINNYHHAH |
| | | DAYLNAVVGTALIKKYPKLESEFVYGDYKVYDVRKMIAKSEQEIGKATAKYFFYSNIMN |
| | | FFKTEITLANGEIRKRPLIETNGETGEIVWDKGRDFATVRKVLSMPQVNIVKKTEVQTG |
| | | GFSKESILPKRNSDKLIARKKDWDPKKYGGFDSPTVAYSVLWVAKVEKGKSKKLKSVKE |
| | | LLGITIMERSSFEKNPIDFLEAKGYKEVKKDLIIKLPKYSLFELENGRKRMLASAGELQ |
| | | KGNELALPSKYVNFLYLASHYEKLKGSPEDNEQKQLFVEQHKHYLDEIIEQISEFSKRV |
| | | ILADANLDKVLSAYNKHRDKPIREQAENIIHLFTLTNLGAPAAFKYFDTTIDRKRYTST |
| | | KEVLDATLIHQSITGLYETRIDLSQLGGDSGGSSGGSSGSETPGTSESATPESSGGSSG |
| | | GSSTLNIEDEYRLHETSKEPDVSLGSTWLSDFPQAWAETGGMGLAVRQAPLIIPLKATS |
| | | TPVSIKQYPMSQEARLGIKPHIQRLLDQGILVPCQSPWNTPLLPVKKPGTNDYRPVQDL |
| | | REVNKRVEDIHPTVPNPYNLLSGLPPSHQWYTVLDLKDAFFCLRLHPTSQPLFAFEWRD |
| | | PEMGISGQLTWTRLPQGFKNSPTLFNEALHRDLADFRIQHPDLILLQYVDDLLLAATSE |
| | | LDCQQGTRALLQTLGNLGYRASAKKAQICQKQVKYLGYLLKEGQRWLTEARKETVMGQP |
| | | TPKTPRQLREFLGKAGFCRLFIPGFAEMAAPLYPLTKPGTLFNWGPDQQKAYQEIKQAL |
| | | LTAPALGLPDLTKPFELFVDEKQGYAKGVLTQKLGPWRRPVAYLSKKLDPVAAGWPPCL |
| | | RMVAAIAVLTKDAGKLTMGQPLVILAPHAVEALVKQPPDRWLSNARMTHYQALLLDTDR |
| | | VQFGPVVALNPATLLPLPEEGLQHNCLDILAEAHGTRPDLTDQPLPDADHTWYTDGSSL |
| | | LQEGQRKAGAAVTTETEVIWAKALPAGTSAQRAELIALTQALKMAEGKKLNVYTDSRYA |
| | | FATAHIHGEIYRRRGWLTSEGKEIKNKDEILALLKALFLPKRLSIIHCPGHQKGHSAEA |
| | | RGNRMADQAARKAAITETPDTSTLLIENSSPSGGSKRTADGSEFEPKKKRKVGSGATNF |
| | | SLLKQAGDVEENPGPPAAKRVKLDGGSKDKKSDGKDSQKKGSRALWIRLSRVTDATTSP |
| | | ERQLESCQQLCAQRGWDVVGVAEDLDVSGAVDPFDRKRRPNLARWLAFEEQPFDVIVAY |
| | | RVDRLTRSIRHLQQLVHWAEDHKKLVVSATEAHFDTTTPFAAVVIALMGTVAQMELEAI |
| | | KERNRSAAHFNIRAGKYRGSLPPWGYLPTRVDGEWRLVPDPVQRERILEVYHRVVDNHE |
| | | PLHLVAHDLNRRGVLSPKDYFAQLQGREPQGREWSATALKRSMISEAMLGYATLNGKTV |
| | | RDDDGAPLVRAEPILTREQLEALRAELVKTSRAKPAVSTPSLLLRVLFCAVCGEPAYKF |
| | | AGGGRKHPRYRCRSMGFPKHCGNGTVAMAEWDAFCEEQVLDLLGDAERLEKVWVAGSDS |
| | | AVELAEVNAELVDLTSLIGSPAYRAGSPQREALDARIAALAARQEELEGLEARPSGWEW |
| | | RETGQRFGDWWREQDTAAKNTWLRSMNVRLTFDVRGGLTRTIDFGDLQEYEQHLRLGSV |
| | | VERLHTGMSGGSPKKKRKV* |
| 630 | PL1930_ | ATGAAGAGAACCGCCGACGGCAGCGAGTTCGAGAGCCCCAAGAAGAAGAGAAAGGTGGA |
| | DNA | CAAGAAGTACAGCATCGGCCTGGACATCGGCACCAACAGCGTGGGCTGGGCCGTGATCA |
| | | CCGACGAGTACAAGGTGCCCAGCAAGAAGTTCAAGGTGCTGGGCAACACCGACAGACAC |
| | | AGCATCAAGAAGAACCTGATCGGCGCCCTGCTGTTCGACAGCGGCGAGACCGCCGAGGC |
| | | CACCAGACTGAAGAGAACCGCCAGAAGAAGATACACCAGAAGAAAGAACAGAATCTGCT |
| | | ACCTGCAGGAGATCTTCAGCAACGAGATGGCCAAGGTGGACGACAGCTTCTTCCACAGA |
| | | CTGGAGGAGAGCTTCCTGGTGGAGGAGGACAAGAAGCACGAGAGACACCCCATCTTCGG |
| | | CAACATCGTGGACGAGGTGGCCTACCACGAGAAGTACCCCACCATCTACCACCTGAGAA |
| | | AGAAGCTGGTGGACAGCACCGACAAGGCCGACCTGAGACTGATCTACCTGGCCCTGGCC |
| | | CACATGATCAAGTTCAGAGGCCACTTCCTGATCGAGGGCGACCTGAACCCCGACAACAG |
| | | CGACGTGGACAAGCTGTTCATCCAGCTGGTGCAGACCTACAACCAGCTGTTCGAGGAGA |
| | | ACCCCATCAACGCCAGCGGCGTGGACGCCAAGGCCATCCTGAGCGCCAGACTGAGCAAG |
| | | AGCAGAAGACTGGAGAACCTGATCGCCCAGCTGCCCGGCGAGAAGAAGAACGGCCTGTT |
| | | CGGCAACCTGATCGCCCTGAGCCTGGGCCTGACCCCCAACTTCAAGAGCAACTTCGACC |
| | | TGGCCGAGGACGCCAAGCTGCAGCTGAGCAAGGACACCTACGACGACGACCTGGACAAC |
| | | CTGCTGGCCCAGATCGGCGACCAGTACGCCGACCTGTTCCTGGCCGCCAAGAACCTGAG |
| | | CGACGCCATCCTGCTGAGCGACATCCTGAGAGTGAACACCGAGATCACCAAGGCCCCCC |
| | | TGAGCGCCAGCATGATCAAGAGATACGACGAGCACCACCAGGACCTGACCCTGCTGAAG |
| | | GCCCTGGTGAGACAGCAGCTGCCCGAGAAGTACAAGGAGATCTTCTTCGACCAGAGCAA |
| | | GAACGGCTACGCCGGCTACATCGACGGCGGCGCCAGCCAGGAGGAGTTCTACAAGTTCA |
| | | TCAAGCCCATCCTGGAGAAGATGGACGGCACCGAGGAGCTGCTGGTGAAGCTGAACAGA |
| | | GAGGACCTGCTGAGAAAGCAGAGAACCTTCGACAACGGCAGCATCCCCCACCAGATCCA |
| | | CCTGGGCGAGCTGCACGCCATCCTGAGAAGACAGGAGGACTTCTACCCCTTCCTGAAGG |
| | | ACAACAGAGAGAAGATCGAGAAGATCCTGACCTTCAGAATCCCCTACTACGTGGGCCCC |
| | | CTGGCCAGAGGCAACAGCAGATTCGCCTGGATGACCAGAAAGAGCGAGGAGACCATCAC |
| | | CCCCTGGAACTTCGAGGAGGTGGTGGACAAGGGCGCCAGCGCCCAGAGCTTCATCGAGA |
| | | GAATGACCAACTTCGACAAGAACCTGCCCAACGAGAAGGTGCTGCCCAAGCACAGCCTG |
| | | CTGTACGAGTACTTCACCGTGTACAACGAGCTGACCAAGGTGAAGTACGTGACCGAGGG |
| | | CATGAGAAAGCCCGCCTTCCTGAGCGGCGAGCAGAAGAAGGCCATCGTGGACCTGCTGT |
| | | TCAAGACCAACAGAAAGGTGACCGTGAAGCAGCTGAAGGAGGACTACTTCAAGAAGATC |
| | | GAGTGCTTCGACAGCGTGGAGATCAGCGGCGTGGAGGACAGATTCAACGCCAGCCTGGG |
| | | CACCTACCACGACCTGCTGAAGATCATCAAGGACAAGGACTTCCTGGACAACGAGGAGA |
| | | ACGAGGACATCCTGGAGGACATCGTGCTGACCCTGACCCTGTTCGAGGACAGAGAGATG |
| | | ATCGAGGAGAGACTGAAGACCTACGCCCACCTGTTCGACGACAAGGTGATGAAGCAGCT |
| | | GAAGAGAAGAAGATACACCGGCTGGGGCAGACTGAGCAGAAAGCTGATCAACGGCATCA |
| | | GAGACAAGCAGAGCGGCAAGACCATCCTGGACTTCCTGAAGAGTGACGGCTTCGCCAAC |
| | | AGAAACTTCATGCAGCTGATCCACGACGACAGCCTGACCTTCAAGGAGGACATCCAGAA |
| | | GGCCCAGGTGAGCGGCCAGGGCGACAGCCTGCACGAGCACATCGCCAACCTGGCCGGCA |
| | | GCCCCGCCATCAAGAAGGGCATCCTGCAGACCGTGAAGGTGGTGGACGAGCTGGTGAAG |
| | | GTGATGGGCAGACACAAGCCCGAGAACATCGTGATCGAGATGGCCAGAGAGAACCAGAC |
| | | CACCCAGAAGGGCCAGAAGAACAGCAGAGAGAGAATGAAGAGAATCGAGGAGGGCATCA |
| | | AGGAGCTGGGCAGCCAGATCCTGAAGGAGCACCCCGTGGAGAACACCCAGCTGCAGAAC |
| | | GAGAAGCTGTACCTGTACTACCTGCAGAACGGCAGAGACATGTACGTGGACCAGGAGCT |
| | | GGACATCAACAGACTGAGCGACTACGACGTGGACGCCATCGTGCCCCAGAGCTTCCTGA |
| | | AGGACGACAGCATCGACAACAAGGTGCTGACCAGAAGCGACAAGAACAGAGGCAAGAGC |
| | | GACAACGTGCCCAGCGAGGAGGTGGTGAAGAAGATGAAGAACTACTGGAGACAGCTGCT |
| | | GAACGCCAAGCTGATCACCCAGAGAAAGTTCGACAACCTGACCAAGGCCGAGAGAGGCG |
| | | GCCTGAGCGAGCTGGACAAGGCCGGCTTCATCAAGAGACAGCTGGTGGAGACCAGACAG |
| | | ATCACCAAGCACGTGGCCCAGATCCTGGACAGCAGAATGAACACCAAGTACGACGAGAA |
| | | CGACAAGCTGATCAGAGAGGTGAAGGTGATCACCCTGAAGAGTAAGCTGGTGAGCGACT |
| | | TCAGAAAGGACTTCCAGTTCTACAAGGTGAGAGAGATCAACAACTACCACCACGCCCAC |
| | | GACGCCTACCTGAACGCCGTGGTGGGCACCGCCCTGATCAAGAAGTACCCCAAGCTGGA |
| | | GAGCGAGTTCGTGTACGGCGACTACAAGGTGTACGACGTGAGAAAGATGATCGCCAAGA |
| | | GCGAGCAGGAGATCGGCAAGGCCACCGCCAAGTACTTCTTCTACAGCAACATCATGAAC |
| | | TTCTTCAAGACCGAGATCACCCTGGCCAACGGCGAGATCAGAAAGAGACCCCTGATCGA |
| | | GACCAACGGCGAGACCGGCGAGATCGTGTGGGACAAGGGCAGAGACTTCGCCACCGTGA |
| | | GAAAGGTGCTGAGCATGCCCCAGGTGAACATCGTGAAGAAGACCGAGGTGCAGACCGGC |
| | | GGCTTCAGCAAGGAGAGCATCCTGCCCAAGAGAAACAGCGACAAGCTGATCGCCAGAAA |
| | | GAAGGACTGGGACCCCAAGAAGTACGGCGGCTTCGACAGCCCCACCGTGGCCTACAGCG |
| | | TGCTGGTGGTGGCCAAGGTGGAGAAGGGCAAGAGCAAGAAGCTGAAGAGTGTGAAGGAG |
| | | CTGCTGGGCATCACCATCATGGAGAGAAGCAGCTTCGAGAAGAACCCCATCGACTTCCT |
| | | GGAGGCCAAGGGCTACAAGGAGGTGAAGAAGGACCTGATCATCAAGCTGCCCAAGTACA |
| | | GCCTGTTCGAGCTGGAGAACGGCAGAAAGAGAATGCTGGCCAGCGCCGGCGAGCTGCAG |
| | | AAGGGCAACGAGCTGGCCCTGCCCAGCAAGTACGTGAACTTCCTGTACCTGGCCAGCCA |
| | | CTACGAGAAGCTGAAGGGCAGCCCCGAGGACAACGAGCAGAAGCAGCTGTTCGTGGAGC |
| | | AGCACAAGCACTACCTGGACGAGATCATCGAGCAGATCAGCGAGTTCAGCAAGAGAGTG |
| | | ATCCTGGCCGACGCCAACCTGGACAAGGTGCTGAGCGCCTACAACAAGCACAGAGACAA |
| | | GCCCATCAGAGAGCAGGCCGAGAACATCATCCACCTGTTCACCCTGACCAACCTGGGCG |
| | | CCCCCGCCGCCTTCAAGTACTTCGACACCACCATCGACAGAAAGAGATACACCAGCACC |
| | | AAGGAGGTGCTGGACGCCACCCTGATCCACCAGAGCATCACCGGCCTGTACGAGACCAG |
| | | AATCGACCTGAGCCAGCTGGGCGGCGACAGCGGCGGCAGCAGCGGCGGCAGCAGCGGCA |
| | | GCGAGACCCCCGGCACCAGCGAGAGCGCCACCCCCGAGAGCAGCGGCGGCAGCAGCGGC |
| | | GGCAGCAGCACCCTGAACATCGAGGACGAGTACAGACTGCACGAGACCAGCAAGGAGCC |
| | | CGACGTGAGCCTGGGCAGCACCTGGCTGAGCGACTTCCCCCAGGCCTGGGCCGAGACCG |
| | | GCGGCATGGGCCTGGCCGTGAGACAGGCCCCCCTGATCATCCCCCTGAAGGCCACCAGC |
| | | ACCCCCGTGAGCATCAAGCAGTACCCCATGAGCCAGGAGGCCAGACTGGGCATCAAGCC |
| | | CCACATCCAGAGACTGCTGGACCAGGGCATCCTGGTGCCCTGCCAGAGCCCCTGGAACA |
| | | CCCCCCTGCTGCCCGTGAAGAAGCCCGGCACCAACGACTACAGACCCGTGCAGGACCTG |
| | | AGAGAGGTGAACAAGAGAGTGGAGGACATCCACCCCACCGTGCCCAACCCCTACAACCT |
| | | GCTGAGCGGCCTGCCCCCCAGCCACCAGTGGTACACCGTGCTGGACCTGAAGGACGCCT |
| | | TCTTCTGCCTGAGACTGCACCCCACCAGCCAGCCCCTGTTCGCCTTCGAGTGGAGAGAC |
| | | CCCGAGATGGGCATCAGCGGCCAGCTGACCTGGACCAGACTGCCCCAGGGCTTCAAGAA |
| | | CAGCCCCACCCTGTTCAACGAGGCCCTGCACAGAGACCTGGCCGACTTCAGAATCCAGC |
| | | ACCCCGACCTGATCCTGCTGCAGTACGTGGACGACCTGCTGCTGGCCGCCACCAGCGAG |
| | | CTGGACTGCCAGCAGGGCACCAGAGCCCTGCTGCAGACCCTGGGCAACCTGGGCTACAG |
| | | AGCCAGCGCCAAGAAGGCCCAGATCTGCCAGAAGCAGGTGAAGTACCTGGGCTACCTGC |
| | | TGAAGGAGGGCCAGAGATGGCTGACCGAGGCCAGAAAGGAGACCGTGATGGGCCAGCCC |
| | | ACCCCCAAGACCCCCAGACAGCTGAGAGAGTTCCTGGGCAAGGCCGGCTTCTGCAGACT |
| | | GTTCATCCCCGGCTTCGCCGAGATGGCCGCCCCCCTGTACCCCCTGACCAAGCCCGGCA |
| | | CCCTGTTCAACTGGGGCCCCGACCAGCAGAAGGCCTACCAGGAGATCAAGCAGGCCCTG |
| | | CTGACCGCCCCCGCCCTGGGCCTGCCCGACCTGACCAAGCCCTTCGAGCTGTTCGTGGA |
| | | CGAGAAGCAGGGCTACGCCAAGGGCGTGCTGACCCAGAAGCTGGGCCCCTGGAGAAGAC |
| | | CCGTGGCCTACCTGAGCAAGAAGCTGGACCCCGTGGCCGCCGGCTGGCCCCCCTGCCTG |
| | | AGAATGGTGGCCGCCATCGCCGTGCTGACCAAGGACGCCGGCAAGCTGACCATGGGCCA |
| | | GCCCCTGGTGATCCTGGCCCCCCACGCCGTGGAGGCCCTGGTGAAGCAGCCCCCCGACA |
| | | GATGGCTGAGCAACGCCAGAATGACCCACTACCAGGCCCTGCTGCTGGACACCGACAGA |
| | | GTGCAGTTCGGCCCCGTGGTGGCCCTGAACCCCGCCACCCTGCTGCCCCTGCCCGAGGA |
| | | GGGCCTGCAGCACAACTGCCTGGACATCCTGGCCGAGGCCCACGGCACCAGACCCGACC |
| | | TGACCGACCAGCCCCTGCCCGACGCCGACCACACCTGGTACACCGACGGCAGCAGCCTG |
| | | CTGCAGGAGGGCCAGAGAAAGGCCGGCGCCGCCGTGACCACCGAGACCGAGGTGATCTG |
| | | GGCCAAGGCCCTGCCCGCCGGCACCAGCGCCCAGAGAGCCGAGCTGATCGCCCTGACCC |
| | | AGGCCCTGAAGATGGCCGAGGGCAAGAAGCTGAACGTGTACACCGACAGCAGATACGCC |
| | | TTCGCCACCGCCCACATCCACGGCGAGATCTACAGAAGAAGAGGCTGGCTGACCAGCGA |
| | | GGGCAAGGAGATCAAGAACAAGGACGAGATCCTGGCCCTGCTGAAGGCCCTGTTCCTGC |
| | | CCAAGAGACTGAGCATCATCCACTGCCCCGGCCACCAGAAGGGCCACAGCGCCGAGGCC |
| | | AGAGGCAACAGAATGGCCGACCAGGCCGCCAGAAAGGCCGCCATCACCGAGACCCCCGA |
| | | CACCAGCACCCTGCTGATCGAGAACAGCAGCCCCAGCGGCGGCAGCAAGAGAACCGCCG |
| | | ACGGCAGCGAGTTCGAGCCCAAGAAGAAGAGAAAGGTGGGCAGCGGCGCCACCAACTTC |
| | | AGCCTGCTGAAGCAGGCCGGCGACGTGGAGGAGAACCCCGGCCCCcctgctgctaagag |
| | | agtgaaactggatggcggcagcAAGGACAAGAAATCCGATGGCAAGGACAGCCAGAAAA |
| | | AAGGCAGCAGAGCCCTGGTGGTGATCAGACTGAGCAGAGTGACCGACGCCACCACCAGC |
| | | CCCGAGAGACAGCTGGAGAGCTGCCAGCAGCTGTGCGCCCAGAGAGGCTGGGACGTGGT |
| | | GGGCGTGGCCGAGGACCTGGACGTGAGCGGCGCCGTGGACCCCTTCGACAGAAAGAGAA |
| | | GACCCAACCTGGCCAGATGGCTGGCCTTCGAGGAGCAGCCCTTCGACGTGATCGTGGCC |
| | | TACAGAGTGGACAGACTGACCAGAAGCATCAGACACCTGCAGCAGCTGGTGCACTGGGC |
| | | CGAGGACCACAAGAAGCTGGTGGTGAGCGCCACCGAGGCCCACTTCGACACCACCACCC |
| | | CCTTCGCCGCCGTGGTGATCGCCCTGATGGGCACCGTGGCCCAGATGGAGCTGGAGGCC |
| | | ATCAAGGAGAGAAACAGAAGCGCCGCCCACTTCAACATCAGAGCCGGCAAGTACAGAGG |
| | | CAGCCTGCCCCCCTGGGGCTACCTGCCCACCAGAGTGGACGGCGAGTGGAGACTGGTGC |
| | | CCGACCCCGTGCAGAGAGAGAGAATCCTGGAGGTGTACCACAGAGTGGTGGACAACCAC |
| | | GAGCCCCTGCACCTGGTGGCCCACGACCTGAACAGAAGAGGCGTGCTGAGCCCCAAGGA |
| | | CTACTTCGCCCAGCTGCAGGGCAGAGAGCCCCAGGGCAGAGAGTGGAGCGCCACCGCCC |
| | | TGAAGAGAAGCATGATCAGCGAGGCCATGCTGGGCTACGCCACCCTGAACGGCAAGACC |
| | | GTGAGAGACGACGACGGCGCCCCCCTGGTGAGAGCCGAGCCCATCCTGACCAGAGAGCA |
| | | GCTGGAGGCCCTGAGAGCCGAGCTGGTGAAGACCAGCAGAGCCAAGCCCGCCGTGAGCA |
| | | CCCCCAGCCTGCTGCTGAGAGTGCTGTTCTGCGCCGTGTGCGGCGAGCCCGCCTACAAG |
| | | TTCGCCGGCGGCGGCAGAAAGCACCCCAGATACAGATGCAGAAGCATGGGCTTCCCCAA |
| | | GCACTGCGGCAACGGCACCGTGGCCATGGCCGAGTGGGACGCCTTCTGCGAGGAGCAGG |
| | | TGCTGGACCTGCTGGGCGACGCCGAGAGACTGGAGAAGGTGTGGGTGGCCGGCAGCGAC |
| | | AGCGCCGTGGAGCTGGCCGAGGTGAACGCCGAGCTGGTGGACCTGACCAGCCTGATCGG |
| | | CAGCCCCGCCTACAGAGCCGGCAGCCCCCAGAGAGAGGCCCTGGACGCCAGAATCGCCG |
| | | CCCTGGCCGCCAGACAGGAGGAGCTGGAGGGCCTGGAGGCCAGACCCAGCGGCTGGGAG |
| | | TGGAGAGAGACCGGCCAGAGATTCGGCGACTGGTGGAGAGAGCAGGACACCGCCGCCAA |
| | | GAACACCTGGCTGAGAAGCATGAACGTGAGACTGACCTTCGACGTGAGAGGCGGCCTGA |
| | | CCAGAACCATCGACTTCGGCGACCTGCAGGAGTACGAGCAGCACCTGAGACTGGGCAGC |
| | | GTGGTGGAGAGACTGCACACCGGCATGAGCGGCGGCAGCCCCAAGAAGAAGAGAAAGGT |
| | | GTGA |
| 631 | PL1931 | MKRTADGSEFESPKKKRKVDKKYSIGLDIGTNSVGWAVITDEYKVPSKKFKVLGNTDRH |
| | _AA | SIKKNLIGALLFDSGETAEATRLKRTARRRYTRRKNRICYLQEIFSNEMAKVDDSFFHR |
| | | LEESFLVEEDKKHERHPIFGNIVDEVAYHEKYPTIYHLRKKLVDSTDKADLRLIYLALA |
| | | HMIKFRGHFLIEGDLNPDNSDVDKLFIQLVQTYNQLFEENPINASGVDAKAILSARLSK |
| | | SRRLENLIAQLPGEKKNGLFGNLIALSLGLTPNFKSNFDLAEDAKLQLSKDTYDDDLDN |
| | | LLAQIGDQYADLFLAAKNLSDAILLSDILRVNTEITKAPLSASMIKRYDEHHQDLTLLK |
| | | ALVRQQLPEKYKEIFFDQSKNGYAGYIDGGASQEEFYKFIKPILEKMDGTEELLVKLNR |
| | | EDLLRKQRTFDNGSIPHQIHLGELHAILRRQEDFYPFLKDNREKIEKILTFRIPYYVGP |
| | | LARGNSRFAWMTRKSEETITPWNFEEVVDKGASAQSFIERMTNFDKNLPNEKVLPKHSL |
| | | LYEYFTVYNELTKVKYVTEGMRKPAFLSGEQKKAIVDLLFKTNRKVTVKQLKEDYFKKI |
| | | ECFDSVEISGVEDRFNASLGTYHDLLKIIKDKDFLDNEENEDILEDIVLTLTLFEDREM |
| | | IEERLKTYAHLFDDKVMKQLKRRRYTGWGRLSRKLINGIRDKQSGKTILDFLKSDGFAN |
| | | RNFMQLIHDDSLTFKEDIQKAQVSGQGDSLHEHIANLAGSPAIKKGILQTVKVVDELVK |
| | | VMGRHKPENIVIEMARENQTTQKGQKNSRERMKRIEEGIKELGSQILKEHPVENTQLQN |
| | | EKLYLYYLQNGRDMYVDQELDINRLSDYDVDAIVPQSFLKDDSIDNKVLTRSDKNRGKS |
| | | DNVPSEEVVKKMKNYWRQLLNAKLITQRKFDNLTKAERGGLSELDKAGFIKRQLVETRQ |
| | | ITKHVAQILDSRMNTKYDENDKLIREVKVITLKSKLVSDFRKDFQFYKVREINNYHHAH |
| | | DAYLNAVVGTALIKKYPKLESEFVYGDYKVYDVRKMIAKSEQEIGKATAKYFFYSNIMN |
| | | FFKTEITLANGEIRKRPLIETNGETGEIVWDKGRDFATVRKVLSMPQVNIVKKTEVQTG |
| | | GFSKESILPKRNSDKLIARKKDWDPKKYGGFDSPTVAYSVLVVAKVEKGKSKKLKSVKE |
| | | LLGITIMERSSFEKNPIDFLEAKGYKEVKKDLIIKLPKYSLFELENGRKRMLASAGELQ |
| | | KGNELALPSKYVNFLYLASHYEKLKGSPEDNEQKQLFVEQHKHYLDEIIEQISEFSKRV |
| | | ILADANLDKVLSAYNKHRDKPIREQAENIIHLFTLTNLGAPAAFKYFDTTIDRKRYTST |
| | | KEVLDATLIHQSITGLYETRIDLSQLGGDSGGSSGGSSGSETPGTSESATPESSGGSSG |
| | | GSSTLNIEDEYRLHETSKEPDVSLGSTWLSDFPQAWAETGGMGLAVRQAPLIIPLKATS |
| | | TPVSIKQYPMSQEARLGIKPHIQRLLDQGILVPCQSPWNTPLLPVKKPGTNDYRPVQDL |
| | | REVNKRVEDIHPTVPNPYNLLSGLPPSHQWYTVLDLKDAFFCLRLHPTSQPLFAFEWRD |
| | | PEMGISGQLTWTRLPQGFKNSPTLFNEALHRDLADFRIQHPDLILLQYVDDLLLAATSE |
| | | LDCQQGTRALLQTLGNLGYRASAKKAQICQKQVKYLGYLLKEGQRWLTEARKETVMGQP |
| | | TPKTPRQLREFLGKAGFCRLFIPGFAEMAAPLYPLTKPGTLFNWGPDQQKAYQEIKQAL |
| | | LTAPALGLPDLTKPFELFVDEKQGYAKGVLTQKLGPWRRPVAYLSKKLDPVAAGWPPCL |
| | | RMVAAIAVLTKDAGKLTMGQPLVILAPHAVEALVKQPPDRWLSNARMTHYQALLLDTDR |
| | | VQFGPVVALNPATLLPLPEEGLQHNCLDILAEAHGTRPDLTDQPLPDADHTWYTDGSSL |
| | | LQEGQRKAGAAVTTETEVIWAKALPAGTSAQRAELIALTQALKMAEGKKLNVYTDSRYA |
| | | FATAHIHGEIYRRRGWLTSEGKEIKNKDEILALLKALFLPKRLSIIHCPGHQKGHSAEA |
| | | RGNRMADQAARKAAITETPDTSTLLIENSSPSGGSKRTADGSEFEPKKKRKVGGSKDKK |
| | | SDGKDSQKKGSGATNFSLLKQAGDVEENPGPPAAKRVKLDGGSKDKKSDGKDSQKKGSR |
| | | ALVVIRLSRVTDATTSPERQLESCQQLCAQRGWDVVGVAEDLDVSGAVDPFDRKRRPNL |
| | | ARWLAFEEQPFDVIVAYRVDRLTRSIRHLQQLVHWAEDHKKLVVSATEAHFDTTTPFAA |
| | | VVIALMGTVAQMELEAIKERNRSAAHFNIRAGKYRGSLPPWGYLPTRVDGEWRLVPDPV |
| | | QRERILEVYHRVVDNHEPLHLVAHDLNRRGVLSPKDYFAQLQGREPQGREWSATALKRS |
| | | MISEAMLGYATLNGKTVRDDDGAPLVRAEPILTREQLEALRAELVKTSRAKPAVSTPSL |
| | | LLRVLFCAVCGEPAYKFAGGGRKHPRYRCRSMGFPKHCGNGTVAMAEWDAFCEEQVLDL |
| | | LGDAERLEKVWVAGSDSAVELAEVNAELVDLTSLIGSPAYRAGSPQREALDARIAALAA |
| | | RQEELEGLEARPSGWEWRETGQRFGDWWREQDTAAKNTWLRSMNVRLTFDVRGGLTRTI |
| | | DFGDLQEYEQHLRLGSVVERLHTGMSGGSPKKKRKV* |
| 632 | PL1931_ | ATGAAGAGAACCGCCGACGGCAGCGAGTTCGAGAGCCCCAAGAAGAAGAGAAAGGTGGA |
| | DNA | CAAGAAGTACAGCATCGGCCTGGACATCGGCACCAACAGCGTGGGCTGGGCCGTGATCA |
| | | CCGACGAGTACAAGGTGCCCAGCAAGAAGTTCAAGGTGCTGGGCAACACCGACAGACAC |
| | | AGCATCAAGAAGAACCTGATCGGCGCCCTGCTGTTCGACAGCGGCGAGACCGCCGAGGC |
| | | CACCAGACTGAAGAGAACCGCCAGAAGAAGATACACCAGAAGAAAGAACAGAATCTGCT |
| | | ACCTGCAGGAGATCTTCAGCAACGAGATGGCCAAGGTGGACGACAGCTTCTTCCACAGA |
| | | CTGGAGGAGAGCTTCCTGGTGGAGGAGGACAAGAAGCACGAGAGACACCCCATCTTCGG |
| | | CAACATCGTGGACGAGGTGGCCTACCACGAGAAGTACCCCACCATCTACCACCTGAGAA |
| | | AGAAGCTGGTGGACAGCACCGACAAGGCCGACCTGAGACTGATCTACCTGGCCCTGGCC |
| | | CACATGATCAAGTTCAGAGGCCACTTCCTGATCGAGGGCGACCTGAACCCCGACAACAG |
| | | CGACGTGGACAAGCTGTTCATCCAGCTGGTGCAGACCTACAACCAGCTGTTCGAGGAGA |
| | | ACCCCATCAACGCCAGCGGCGTGGACGCCAAGGCCATCCTGAGCGCCAGACTGAGCAAG |
| | | AGCAGAAGACTGGAGAACCTGATCGCCCAGCTGCCCGGCGAGAAGAAGAACGGCCTGTT |
| | | CGGCAACCTGATCGCCCTGAGCCTGGGCCTGACCCCCAACTTCAAGAGCAACTTCGACC |
| | | TGGCCGAGGACGCCAAGCTGCAGCTGAGCAAGGACACCTACGACGACGACCTGGACAAC |
| | | CTGCTGGCCCAGATCGGCGACCAGTACGCCGACCTGTTCCTGGCCGCCAAGAACCTGAG |
| | | CGACGCCATCCTGCTGAGCGACATCCTGAGAGTGAACACCGAGATCACCAAGGCCCCCC |
| | | TGAGCGCCAGCATGATCAAGAGATACGACGAGCACCACCAGGACCTGACCCTGCTGAAG |
| | | GCCCTGGTGAGACAGCAGCTGCCCGAGAAGTACAAGGAGATCTTCTTCGACCAGAGCAA |
| | | GAACGGCTACGCCGGCTACATCGACGGCGGCGCCAGCCAGGAGGAGTTCTACAAGTTCA |
| | | TCAAGCCCATCCTGGAGAAGATGGACGGCACCGAGGAGCTGCTGGTGAAGCTGAACAGA |
| | | GAGGACCTGCTGAGAAAGCAGAGAACCTTCGACAACGGCAGCATCCCCCACCAGATCCA |
| | | CCTGGGCGAGCTGCACGCCATCCTGAGAAGACAGGAGGACTTCTACCCCTTCCTGAAGG |
| | | ACAACAGAGAGAAGATCGAGAAGATCCTGACCTTCAGAATCCCCTACTACGTGGGCCCC |
| | | CTGGCCAGAGGCAACAGCAGATTCGCCTGGATGACCAGAAAGAGCGAGGAGACCATCAC |
| | | CCCCTGGAACTTCGAGGAGGTGGTGGACAAGGGCGCCAGCGCCCAGAGCTTCATCGAGA |
| | | GAATGACCAACTTCGACAAGAACCTGCCCAACGAGAAGGTGCTGCCCAAGCACAGCCTG |
| | | CTGTACGAGTACTTCACCGTGTACAACGAGCTGACCAAGGTGAAGTACGTGACCGAGGG |
| | | CATGAGAAAGCCCGCCTTCCTGAGCGGCGAGCAGAAGAAGGCCATCGTGGACCTGCTGT |
| | | TCAAGACCAACAGAAAGGTGACCGTGAAGCAGCTGAAGGAGGACTACTTCAAGAAGATC |
| | | GAGTGCTTCGACAGCGTGGAGATCAGCGGCGTGGAGGACAGATTCAACGCCAGCCTGGG |
| | | CACCTACCACGACCTGCTGAAGATCATCAAGGACAAGGACTTCCTGGACAACGAGGAGA |
| | | ACGAGGACATCCTGGAGGACATCGTGCTGACCCTGACCCTGTTCGAGGACAGAGAGATG |
| | | ATCGAGGAGAGACTGAAGACCTACGCCCACCTGTTCGACGACAAGGTGATGAAGCAGCT |
| | | GAAGAGAAGAAGATACACCGGCTGGGGCAGACTGAGCAGAAAGCTGATCAACGGCATCA |
| | | GAGACAAGCAGAGCGGCAAGACCATCCTGGACTTCCTGAAGAGTGACGGCTTCGCCAAC |
| | | AGAAACTTCATGCAGCTGATCCACGACGACAGCCTGACCTTCAAGGAGGACATCCAGAA |
| | | GGCCCAGGTGAGCGGCCAGGGCGACAGCCTGCACGAGCACATCGCCAACCTGGCCGGCA |
| | | GCCCCGCCATCAAGAAGGGCATCCTGCAGACCGTGAAGGTGGTGGACGAGCTGGTGAAG |
| | | GTGATGGGCAGACACAAGCCCGAGAACATCGTGATCGAGATGGCCAGAGAGAACCAGAC |
| | | CACCCAGAAGGGCCAGAAGAACAGCAGAGAGAGAATGAAGAGAATCGAGGAGGGCATCA |
| | | AGGAGCTGGGCAGCCAGATCCTGAAGGAGCACCCCGTGGAGAACACCCAGCTGCAGAAC |
| | | GAGAAGCTGTACCTGTACTACCTGCAGAACGGCAGAGACATGTACGTGGACCAGGAGCT |
| | | GGACATCAACAGACTGAGCGACTACGACGTGGACGCCATCGTGCCCCAGAGCTTCCTGA |
| | | AGGACGACAGCATCGACAACAAGGTGCTGACCAGAAGCGACAAGAACAGAGGCAAGAGC |
| | | GACAACGTGCCCAGCGAGGAGGTGGTGAAGAAGATGAAGAACTACTGGAGACAGCTGCT |
| | | GAACGCCAAGCTGATCACCCAGAGAAAGTTCGACAACCTGACCAAGGCCGAGAGAGGCG |
| | | GCCTGAGCGAGCTGGACAAGGCCGGCTTCATCAAGAGACAGCTGGTGGAGACCAGACAG |
| | | ATCACCAAGCACGTGGCCCAGATCCTGGACAGCAGAATGAACACCAAGTACGACGAGAA |
| | | CGACAAGCTGATCAGAGAGGTGAAGGTGATCACCCTGAAGAGTAAGCTGGTGAGCGACT |
| | | TCAGAAAGGACTTCCAGTTCTACAAGGTGAGAGAGATCAACAACTACCACCACGCCCAC |
| | | GACGCCTACCTGAACGCCGTGGTGGGCACCGCCCTGATCAAGAAGTACCCCAAGCTGGA |
| | | GAGCGAGTTCGTGTACGGCGACTACAAGGTGTACGACGTGAGAAAGATGATCGCCAAGA |
| | | GCGAGCAGGAGATCGGCAAGGCCACCGCCAAGTACTTCTTCTACAGCAACATCATGAAC |
| | | TTCTTCAAGACCGAGATCACCCTGGCCAACGGCGAGATCAGAAAGAGACCCCTGATCGA |
| | | GACCAACGGCGAGACCGGCGAGATCGTGTGGGACAAGGGCAGAGACTTCGCCACCGTGA |
| | | GAAAGGTGCTGAGCATGCCCCAGGTGAACATCGTGAAGAAGACCGAGGTGCAGACCGGC |
| | | GGCTTCAGCAAGGAGAGCATCCTGCCCAAGAGAAACAGCGACAAGCTGATCGCCAGAAA |
| | | GAAGGACTGGGACCCCAAGAAGTACGGCGGCTTCGACAGCCCCACCGTGGCCTACAGCG |
| | | TGCTGGTGGTGGCCAAGGTGGAGAAGGGCAAGAGCAAGAAGCTGAAGAGTGTGAAGGAG |
| | | CTGCTGGGCATCACCATCATGGAGAGAAGCAGCTTCGAGAAGAACCCCATCGACTTCCT |
| | | GGAGGCCAAGGGCTACAAGGAGGTGAAGAAGGACCTGATCATCAAGCTGCCCAAGTACA |
| | | GCCTGTTCGAGCTGGAGAACGGCAGAAAGAGAATGCTGGCCAGCGCCGGCGAGCTGCAG |
| | | AAGGGCAACGAGCTGGCCCTGCCCAGCAAGTACGTGAACTTCCTGTACCTGGCCAGCCA |
| | | CTACGAGAAGCTGAAGGGCAGCCCCGAGGACAACGAGCAGAAGCAGCTGTTCGTGGAGC |
| | | AGCACAAGCACTACCTGGACGAGATCATCGAGCAGATCAGCGAGTTCAGCAAGAGAGTG |
| | | ATCCTGGCCGACGCCAACCTGGACAAGGTGCTGAGCGCCTACAACAAGCACAGAGACAA |
| | | GCCCATCAGAGAGCAGGCCGAGAACATCATCCACCTGTTCACCCTGACCAACCTGGGCG |
| | | CCCCCGCCGCCTTCAAGTACTTCGACACCACCATCGACAGAAAGAGATACACCAGCACC |
| | | AAGGAGGTGCTGGACGCCACCCTGATCCACCAGAGCATCACCGGCCTGTACGAGACCAG |
| | | AATCGACCTGAGCCAGCTGGGGGGCGACAGCGGCGGCAGCAGCGGCGGCAGCAGCGGCA |
| | | GCGAGACCCCCGGCACCAGCGAGAGCGCCACCCCCGAGAGCAGCGGCGGCAGCAGCGGC |
| | | GGCAGCAGCACCCTGAACATCGAGGACGAGTACAGACTGCACGAGACCAGCAAGGAGCC |
| | | CGACGTGAGCCTGGGCAGCACCTGGCTGAGCGACTTCCCCCAGGCCTGGGCCGAGACCG |
| | | GCGGCATGGGCCTGGCCGTGAGACAGGCCCCCCTGATCATCCCCCTGAAGGCCACCAGC |
| | | ACCCCCGTGAGCATCAAGCAGTACCCCATGAGCCAGGAGGCCAGACTGGGCATCAAGCC |
| | | CCACATCCAGAGACTGCTGGACCAGGGCATCCTGGTGCCCTGCCAGAGCCCCTGGAACA |
| | | CCCCCCTGCTGCCCGTGAAGAAGCCCGGCACCAACGACTACAGACCCGTGCAGGACCTG |
| | | AGAGAGGTGAACAAGAGAGTGGAGGACATCCACCCCACCGTGCCCAACCCCTACAACCT |
| | | GCTGAGCGGCCTGCCCCCCAGCCACCAGTGGTACACCGTGCTGGACCTGAAGGACGCCT |
| | | TCTTCTGCCTGAGACTGCACCCCACCAGCCAGCCCCTGTTCGCCTTCGAGTGGAGAGAC |
| | | CCCGAGATGGGCATCAGCGGCCAGCTGACCTGGACCAGACTGCCCCAGGGCTTCAAGAA |
| | | CAGCCCCACCCTGTTCAACGAGGCCCTGCACAGAGACCTGGCCGACTTCAGAATCCAGC |
| | | ACCCCGACCTGATCCTGCTGCAGTACGTGGACGACCTGCTGCTGGCCGCCACCAGCGAG |
| | | CTGGACTGCCAGCAGGGCACCAGAGCCCTGCTGCAGACCCTGGGCAACCTGGGCTACAG |
| | | AGCCAGCGCCAAGAAGGCCCAGATCTGCCAGAAGCAGGTGAAGTACCTGGGCTACCTGC |
| | | TGAAGGAGGGCCAGAGATGGCTGACCGAGGCCAGAAAGGAGACCGTGATGGGCCAGCCC |
| | | ACCCCCAAGACCCCCAGACAGCTGAGAGAGTTCCTGGGCAAGGCCGGCTTCTGCAGACT |
| | | GTTCATCCCCGGCTTCGCCGAGATGGCCGCCCCCCTGTACCCCCTGACCAAGCCCGGCA |
| | | CCCTGTTCAACTGGGGCCCCGACCAGCAGAAGGCCTACCAGGAGATCAAGCAGGCCCTG |
| | | CTGACCGCCCCCGCCCTGGGCCTGCCCGACCTGACCAAGCCCTTCGAGCTGTTCGTGGA |
| | | CGAGAAGCAGGGCTACGCCAAGGGCGTGCTGACCCAGAAGCTGGGCCCCTGGAGAAGAC |
| | | CCGTGGCCTACCTGAGCAAGAAGCTGGACCCCGTGGCCGCCGGCTGGCCCCCCTGCCTG |
| | | AGAATGGTGGCCGCCATCGCCGTGCTGACCAAGGACGCCGGCAAGCTGACCATGGGCCA |
| | | GCCCCTGGTGATCCTGGCCCCCCACGCCGTGGAGGCCCTGGTGAAGCAGCCCCCCGACA |
| | | GATGGCTGAGCAACGCCAGAATGACCCACTACCAGGCCCTGCTGCTGGACACCGACAGA |
| | | GTGCAGTTCGGCCCCGTGGTGGCCCTGAACCCCGCCACCCTGCTGCCCCTGCCCGAGGA |
| | | GGGCCTGCAGCACAACTGCCTGGACATCCTGGCCGAGGCCCACGGCACCAGACCCGACC |
| | | TGACCGACCAGCCCCTGCCCGACGCCGACCACACCTGGTACACCGACGGCAGCAGCCTG |
| | | CTGCAGGAGGGCCAGAGAAAGGCCGGCGCCGCCGTGACCACCGAGACCGAGGTGATCTG |
| | | GGCCAAGGCCCTGCCCGCCGGCACCAGCGCCCAGAGAGCCGAGCTGATCGCCCTGACCC |
| | | AGGCCCTGAAGATGGCCGAGGGCAAGAAGCTGAACGTGTACACCGACAGCAGATACGCC |
| | | TTCGCCACCGCCCACATCCACGGCGAGATCTACAGAAGAAGAGGCTGGCTGACCAGCGA |
| | | GGGCAAGGAGATCAAGAACAAGGACGAGATCCTGGCCCTGCTGAAGGCCCTGTTCCTGC |
| | | CCAAGAGACTGAGCATCATCCACTGCCCCGGCCACCAGAAGGGCCACAGCGCCGAGGCC |
| | | AGAGGCAACAGAATGGCCGACCAGGCCGCCAGAAAGGCCGCCATCACCGAGACCCCCGA |
| | | CACCAGCACCCTGCTGATCGAGAACAGCAGCCCCAGCGGCGGCAGCAAGAGAACCGCCG |
| | | ACGGCAGCGAGTTCGAGCCCAAGAAGAAGAGAAAGGTGggcggcagcAAGGACAAAAAG |
| | | AGCGACGGCAAGGACTCGCAAAAAAAAGGCAGCGGCGCCACCAACTTCAGCCTGCTGAA |
| | | GCAGGCCGGCGACGTGGAGGAGAACCCCGGCCCCcctgctgctaagagagtgaaactgg |
| | | atggcggcagcAAGGACAAGAAATCCGATGGCAAGGACAGCCAGAAAAAAGGCAGCAGA |
| | | GCCCTGGTGGTGATCAGACTGAGCAGAGTGACCGACGCCACCACCAGCCCCGAGAGACA |
| | | GCTGGAGAGCTGCCAGCAGCTGTGCGCCCAGAGAGGCTGGGACGTGGTGGGCGTGGCCG |
| | | AGGACCTGGACGTGAGCGGCGCCGTGGACCCCTTCGACAGAAAGAGAAGACCCAACCTG |
| | | GCCAGATGGCTGGCCTTCGAGGAGCAGCCCTTCGACGTGATCGTGGCCTACAGAGTGGA |
| | | CAGACTGACCAGAAGCATCAGACACCTGCAGCAGCTGGTGCACTGGGCCGAGGACCACA |
| | | AGAAGCTGGTGGTGAGCGCCACCGAGGCCCACTTCGACACCACCACCCCCTTCGCCGCC |
| | | GTGGTGATCGCCCTGATGGGCACCGTGGCCCAGATGGAGCTGGAGGCCATCAAGGAGAG |
| | | AAACAGAAGCGCCGCCCACTTCAACATCAGAGCCGGCAAGTACAGAGGCAGCCTGCCCC |
| | | CCTGGGGCTACCTGCCCACCAGAGTGGACGGCGAGTGGAGACTGGTGCCCGACCCCGTG |
| | | CAGAGAGAGAGAATCCTGGAGGTGTACCACAGAGTGGTGGACAACCACGAGCCCCTGCA |
| | | CCTGGTGGCCCACGACCTGAACAGAAGAGGCGTGCTGAGCCCCAAGGACTACTTCGCCC |
| | | AGCTGCAGGGCAGAGAGCCCCAGGGCAGAGAGTGGAGCGCCACCGCCCTGAAGAGAAGC |
| | | ATGATCAGCGAGGCCATGCTGGGCTACGCCACCCTGAACGGCAAGACCGTGAGAGACGA |
| | | CGACGGCGCCCCCCTGGTGAGAGCCGAGCCCATCCTGACCAGAGAGCAGCTGGAGGCCC |
| | | TGAGAGCCGAGCTGGTGAAGACCAGCAGAGCCAAGCCCGCCGTGAGCACCCCCAGCCTG |
| | | CTGCTGAGAGTGCTGTTCTGCGCCGTGTGCGGCGAGCCCGCCTACAAGTTCGCCGGCGG |
| | | CGGCAGAAAGCACCCCAGATACAGATGCAGAAGCATGGGCTTCCCCAAGCACTGCGGCA |
| | | ACGGCACCGTGGCCATGGCCGAGTGGGACGCCTTCTGCGAGGAGCAGGTGCTGGACCTG |
| | | CTGGGCGACGCCGAGAGACTGGAGAAGGTGTGGGTGGCCGGCAGCGACAGCGCCGTGGA |
| | | GCTGGCCGAGGTGAACGCCGAGCTGGTGGACCTGACCAGCCTGATCGGCAGCCCCGCCT |
| | | ACAGAGCCGGCAGCCCCCAGAGAGAGGCCCTGGACGCCAGAATCGCCGCCCTGGCCGCC |
| | | AGACAGGAGGAGCTGGAGGGCCTGGAGGCCAGACCCAGCGGCTGGGAGTGGAGAGAGAC |
| | | CGGCCAGAGATTCGGCGACTGGTGGAGAGAGCAGGACACCGCCGCCAAGAACACCTGGC |
| | | TGAGAAGCATGAACGTGAGACTGACCTTCGACGTGAGAGGCGGCCTGACCAGAACCATC |
| | | GACTTCGGCGACCTGCAGGAGTACGAGCAGCACCTGAGACTGGGCAGCGTGGTGGAGAG |
| | | ACTGCACACCGGCATGAGCGGCGGCAGCCCCAAGAAGAAGAGAAAGGTGTGA |
| 633 | PL1932 | MPAAKRVKLDGGSRALWIRLSRVTDATTSPERQLESCQQLCAQRGWDVVGVAEDLDVSG |
| | _AA | AVDPFDRKRRPNLARWLAFEEQPFDVIVAYRVDRLTRSIRHLQQLVHWAEDHKKLVVSA |
| | | TEAHFDTTTPFAAVVIALMGTVAQMELEAIKERNRSAAHFNIRAGKYRGSLPPWGYLPT |
| | | RVDGEWRLVPDPVQRERILEVYHRVVDNHEPLHLVAHDLNRRGVLSPKDYFAQLQGREP |
| | | QGREWSATALKRSMISEAMLGYATLNGKTVRDDDGAPLVRAEPILTREQLEALRAELVK |
| | | TSRAKPAVSTPSLLLRVLFCAVCGEPAYKFAGGGRKHPRYRCRSMGFPKHCGNGTVAMA |
| | | EWDAFCEEQVLDLLGDAERLEKVWVAGSDSAVELAEVNAELVDLTSLIGSPAYRAGSPQ |
| | | REALDARIAALAARQEELEGLEARPSGWEWRETGQRFGDWWREQDTAAKNTWLRSMNVR |
| | | LTFDVRGGLTRTIDFGDLQEYEQHLRLGSVVERLHTGMSGGSPKKKRKVGSGATNFSLL |
| | | KQAGDVEENPGPKRTADGSEFESPKKKRKVDKKYSIGLDIGTNSVGWAVITDEYKVPSK |
| | | KFKVLGNTDRHSIKKNLIGALLFDSGETAEATRLKRTARRRYTRRKNRICYLQEIFSNE |
| | | MAKVDDSFFHRLEESFLVEEDKKHERHPIFGNIVDEVAYHEKYPTIYHLRKKLVDSTDK |
| | | ADLRLIYLALAHMIKFRGHFLIEGDLNPDNSDVDKLFIQLVQTYNQLFEENPINASGVD |
| | | AKAILSARLSKSRRLENLIAQLPGEKKNGLFGNLIALSLGLTPNFKSNFDLAEDAKLQL |
| | | SKDTYDDDLDNLLAQIGDQYADLFLAAKNLSDAILLSDILRVNTEITKAPLSASMIKRY |
| | | DEHHQDLTLLKALVRQQLPEKYKEIFFDQSKNGYAGYIDGGASQEEFYKFIKPILEKMD |
| | | GTEELLVKLNREDLLRKQRTFDNGSIPHQIHLGELHAILRRQEDFYPFLKDNREKIEKI |
| | | LTFRIPYYVGPLARGNSRFAWMTRKSEETITPWNFEEVVDKGASAQSFIERMTNFDKNL |
| | | PNEKVLPKHSLLYEYFTVYNELTKVKYVTEGMRKPAFLSGEQKKAIVDLLFKTNRKVTV |
| | | KQLKEDYFKKIECFDSVEISGVEDRFNASLGTYHDLLKIIKDKDFLDNEENEDILEDIV |
| | | LTLTLFEDREMIEERLKTYAHLFDDKVMKQLKRRRYTGWGRLSRKLINGIRDKQSGKTI |
| | | LDFLKSDGFANRNFMQLIHDDSLTFKEDIQKAQVSGQGDSLHEHIANLAGSPAIKKGIL |
| | | QTVKVVDELVKVMGRHKPENIVIEMARENQTTQKGQKNSRERMKRIEEGIKELGSQILK |
| | | EHPVENTQLQNEKLYLYYLQNGRDMYVDQELDINRLSDYDVDAIVPQSFLKDDSIDNKV |
| | | LTRSDKNRGKSDNVPSEEVVKKMKNYWRQLLNAKLITQRKFDNLTKAERGGLSELDKAG |
| | | FIKRQLVETRQITKHVAQILDSRMNTKYDENDKLIREVKVITLKSKLVSDFRKDFQFYK |
| | | VREINNYHHAHDAYLNAVVGTALIKKYPKLESEFVYGDYKVYDVRKMIAKSEQEIGKAT |
| | | AKYFFYSNIMNFFKTEITLANGEIRKRPLIETNGETGEIVWDKGRDFATVRKVLSMPQV |
| | | NIVKKTEVQTGGFSKESILPKRNSDKLIARKKDWDPKKYGGFDSPTVAYSVLWVAKVEK |
| | | GKSKKLKSVKELLGITIMERSSFEKNPIDFLEAKGYKEVKKDLIIKLPKYSLFELENGR |
| | | KRMLASAGELQKGNELALPSKYVNFLYLASHYEKLKGSPEDNEQKQLFVEQHKHYLDEI |
| | | IEQISEFSKRVILADANLDKVLSAYNKHRDKPIREQAENIIHLFTLTNLGAPAAFKYFD |
| | | TTIDRKRYTSTKEVLDATLIHQSITGLYETRIDLSQLGGDSGGSSGGSSGSETPGTSES |
| | | ATPESSGGSSGGSSTLNIEDEYRLHETSKEPDVSLGSTWLSDFPQAWAETGGMGLAVRQ |
| | | APLIIPLKATSTPVSIKQYPMSQEARLGIKPHIQRLLDQGILVPCQSPWNTPLLPVKKP |
| | | GTNDYRPVQDLREVNKRVEDIHPTVPNPYNLLSGLPPSHQWYTVLDLKDAFFCLRLHPT |
| | | SQPLFAFEWRDPEMGISGQLTWTRLPQGFKNSPTLFNEALHRDLADFRIQHPDLILLQY |
| | | VDDLLLAATSELDCQQGTRALLQTLGNLGYRASAKKAQICQKQVKYLGYLLKEGQRWLT |
| | | EARKETVMGQPTPKTPRQLREFLGKAGFCRLFIPGFAEMAAPLYPLTKPGTLFNWGPDQ |
| | | QKAYQEIKQALLTAPALGLPDLTKPFELFVDEKQGYAKGVLTQKLGPWRRPVAYLSKKL |
| | | DPVAAGWPPCLRMVAAIAVLTKDAGKLTMGQPLVILAPHAVEALVKQPPDRWLSNARMT |
| | | HYQALLLDTDRVQFGPVVALNPATLLPLPEEGLQHNCLDILAEAHGTRPDLTDQPLPDA |
| | | DHTWYTDGSSLLQEGQRKAGAAVTTETEVIWAKALPAGTSAQRAELIALTQALKMAEGK |
| | | KLNVYTDSRYAFATAHIHGEIYRRRGWLTSEGKEIKNKDEILALLKALFLPKRLSIIHC |
| | | PGHQKGHSAEARGNRMADQAARKAAITETPDTSTLLIENSSPSGGSKRTADGSEFEPKK |
| | | KRKV* |
| 634 | PL1932_ | ATGcctgctgctaagagagtgaaactggatggcggcagcAGAGCCCTGGTGGTGATCAG |
| | DNA | ACTGAGCAGAGTGACCGACGCCACCACCAGCCCCGAGAGACAGCTGGAGAGCTGCCAGC |
| | | AGCTGTGCGCCCAGAGAGGCTGGGACGTGGTGGGCGTGGCCGAGGACCTGGACGTGAGC |
| | | GGCGCCGTGGACCCCTTCGACAGAAAGAGAAGACCCAACCTGGCCAGATGGCTGGCCTT |
| | | CGAGGAGCAGCCCTTCGACGTGATCGTGGCCTACAGAGTGGACAGACTGACCAGAAGCA |
| | | TCAGACACCTGCAGCAGCTGGTGCACTGGGCCGAGGACCACAAGAAGCTGGTGGTGAGC |
| | | GCCACCGAGGCCCACTTCGACACCACCACCCCCTTCGCCGCCGTGGTGATCGCCCTGAT |
| | | GGGCACCGTGGCCCAGATGGAGCTGGAGGCCATCAAGGAGAGAAACAGAAGCGCCGCCC |
| | | ACTTCAACATCAGAGCCGGCAAGTACAGAGGCAGCCTGCCCCCCTGGGGCTACCTGCCC |
| | | ACCAGAGTGGACGGCGAGTGGAGACTGGTGCCCGACCCCGTGCAGAGAGAGAGAATCCT |
| | | GGAGGTGTACCACAGAGTGGTGGACAACCACGAGCCCCTGCACCTGGTGGCCCACGACC |
| | | TGAACAGAAGAGGCGTGCTGAGCCCCAAGGACTACTTCGCCCAGCTGCAGGGCAGAGAG |
| | | CCCCAGGGCAGAGAGTGGAGCGCCACCGCCCTGAAGAGAAGCATGATCAGCGAGGCCAT |
| | | GCTGGGCTACGCCACCCTGAACGGCAAGACCGTGAGAGACGACGACGGCGCCCCCCTGG |
| | | TGAGAGCCGAGCCCATCCTGACCAGAGAGCAGCTGGAGGCCCTGAGAGCCGAGCTGGTG |
| | | AAGACCAGCAGAGCCAAGCCCGCCGTGAGCACCCCCAGCCTGCTGCTGAGAGTGCTGTT |
| | | CTGCGCCGTGTGCGGCGAGCCCGCCTACAAGTTCGCCGGCGGCGGCAGAAAGCACCCCA |
| | | GATACAGATGCAGAAGCATGGGCTTCCCCAAGCACTGCGGCAACGGCACCGTGGCCATG |
| | | GCCGAGTGGGACGCCTTCTGCGAGGAGCAGGTGCTGGACCTGCTGGGCGACGCCGAGAG |
| | | ACTGGAGAAGGTGTGGGTGGCCGGCAGCGACAGCGCCGTGGAGCTGGCCGAGGTGAACG |
| | | CCGAGCTGGTGGACCTGACCAGCCTGATCGGCAGCCCCGCCTACAGAGCCGGCAGCCCC |
| | | CAGAGAGAGGCCCTGGACGCCAGAATCGCCGCCCTGGCCGCCAGACAGGAGGAGCTGGA |
| | | GGGCCTGGAGGCCAGACCCAGCGGCTGGGAGTGGAGAGAGACCGGCCAGAGATTCGGCG |
| | | ACTGGTGGAGAGAGCAGGACACCGCCGCCAAGAACACCTGGCTGAGAAGCATGAACGTG |
| | | AGACTGACCTTCGACGTGAGAGGCGGCCTGACCAGAACCATCGACTTCGGCGACCTGCA |
| | | GGAGTACGAGCAGCACCTGAGACTGGGCAGCGTGGTGGAGAGACTGCACACCGGCATGA |
| | | GCGGCGGCAGCCCCAAGAAGAAGAGAAAGGTGGGCAGCGGCGCCACCAACTTCAGCCTG |
| | | CTGAAGCAGGCCGGCGACGTGGAGGAGAACCCCGGCCCCAAGAGAACCGCCGACGGCAG |
| | | CGAGTTCGAGAGCCCCAAGAAGAAGAGAAAGGTGGACAAGAAGTACAGCATCGGCCTGG |
| | | ACATCGGCACCAACAGCGTGGGCTGGGCCGTGATCACCGACGAGTACAAGGTGCCCAGC |
| | | AAGAAGTTCAAGGTGCTGGGCAACACCGACAGACACAGCATCAAGAAGAACCTGATCGG |
| | | CGCCCTGCTGTTCGACAGCGGCGAGACCGCCGAGGCCACCAGACTGAAGAGAACCGCCA |
| | | GAAGAAGATACACCAGAAGAAAGAACAGAATCTGCTACCTGCAGGAGATCTTCAGCAAC |
| | | GAGATGGCCAAGGTGGACGACAGCTTCTTCCACAGACTGGAGGAGAGCTTCCTGGTGGA |
| | | GGAGGACAAGAAGCACGAGAGACACCCCATCTTCGGCAACATCGTGGACGAGGTGGCCT |
| | | ACCACGAGAAGTACCCCACCATCTACCACCTGAGAAAGAAGCTGGTGGACAGCACCGAC |
| | | AAGGCCGACCTGAGACTGATCTACCTGGCCCTGGCCCACATGATCAAGTTCAGAGGCCA |
| | | CTTCCTGATCGAGGGCGACCTGAACCCCGACAACAGCGACGTGGACAAGCTGTTCATCC |
| | | AGCTGGTGCAGACCTACAACCAGCTGTTCGAGGAGAACCCCATCAACGCCAGCGGCGTG |
| | | GACGCCAAGGCCATCCTGAGCGCCAGACTGAGCAAGAGCAGAAGACTGGAGAACCTGAT |
| | | CGCCCAGCTGCCCGGCGAGAAGAAGAACGGCCTGTTCGGCAACCTGATCGCCCTGAGCC |
| | | TGGGCCTGACCCCCAACTTCAAGAGCAACTTCGACCTGGCCGAGGACGCCAAGCTGCAG |
| | | CTGAGCAAGGACACCTACGACGACGACCTGGACAACCTGCTGGCCCAGATCGGCGACCA |
| | | GTACGCCGACCTGTTCCTGGCCGCCAAGAACCTGAGCGACGCCATCCTGCTGAGCGACA |
| | | TCCTGAGAGTGAACACCGAGATCACCAAGGCCCCCCTGAGCGCCAGCATGATCAAGAGA |
| | | TACGACGAGCACCACCAGGACCTGACCCTGCTGAAGGCCCTGGTGAGACAGCAGCTGCC |
| | | CGAGAAGTACAAGGAGATCTTCTTCGACCAGAGCAAGAACGGCTACGCCGGCTACATCG |
| | | ACGGCGGCGCCAGCCAGGAGGAGTTCTACAAGTTCATCAAGCCCATCCTGGAGAAGATG |
| | | GACGGCACCGAGGAGCTGCTGGTGAAGCTGAACAGAGAGGACCTGCTGAGAAAGCAGAG |
| | | AACCTTCGACAACGGCAGCATCCCCCACCAGATCCACCTGGGCGAGCTGCACGCCATCC |
| | | TGAGAAGACAGGAGGACTTCTACCCCTTCCTGAAGGACAACAGAGAGAAGATCGAGAAG |
| | | ATCCTGACCTTCAGAATCCCCTACTACGTGGGCCCCCTGGCCAGAGGCAACAGCAGATT |
| | | CGCCTGGATGACCAGAAAGAGCGAGGAGACCATCACCCCCTGGAACTTCGAGGAGGTGG |
| | | TGGACAAGGGCGCCAGCGCCCAGAGCTTCATCGAGAGAATGACCAACTTCGACAAGAAC |
| | | CTGCCCAACGAGAAGGTGCTGCCCAAGCACAGCCTGCTGTACGAGTACTTCACCGTGTA |
| | | CAACGAGCTGACCAAGGTGAAGTACGTGACCGAGGGCATGAGAAAGCCCGCCTTCCTGA |
| | | GCGGCGAGCAGAAGAAGGCCATCGTGGACCTGCTGTTCAAGACCAACAGAAAGGTGACC |
| | | GTGAAGCAGCTGAAGGAGGACTACTTCAAGAAGATCGAGTGCTTCGACAGCGTGGAGAT |
| | | CAGCGGCGTGGAGGACAGATTCAACGCCAGCCTGGGCACCTACCACGACCTGCTGAAGA |
| | | TCATCAAGGACAAGGACTTCCTGGACAACGAGGAGAACGAGGACATCCTGGAGGACATC |
| | | GTGCTGACCCTGACCCTGTTCGAGGACAGAGAGATGATCGAGGAGAGACTGAAGACCTA |
| | | CGCCCACCTGTTCGACGACAAGGTGATGAAGCAGCTGAAGAGAAGAAGATACACCGGCT |
| | | GGGGCAGACTGAGCAGAAAGCTGATCAACGGCATCAGAGACAAGCAGAGCGGCAAGACC |
| | | ATCCTGGACTTCCTGAAGAGTGACGGCTTCGCCAACAGAAACTTCATGCAGCTGATCCA |
| | | CGACGACAGCCTGACCTTCAAGGAGGACATCCAGAAGGCCCAGGTGAGCGGCCAGGGCG |
| | | ACAGCCTGCACGAGCACATCGCCAACCTGGCCGGCAGCCCCGCCATCAAGAAGGGCATC |
| | | CTGCAGACCGTGAAGGTGGTGGACGAGCTGGTGAAGGTGATGGGCAGACACAAGCCCGA |
| | | GAACATCGTGATCGAGATGGCCAGAGAGAACCAGACCACCCAGAAGGGCCAGAAGAACA |
| | | GCAGAGAGAGAATGAAGAGAATCGAGGAGGGCATCAAGGAGCTGGGCAGCCAGATCCTG |
| | | AAGGAGCACCCCGTGGAGAACACCCAGCTGCAGAACGAGAAGCTGTACCTGTACTACCT |
| | | GCAGAACGGCAGAGACATGTACGTGGACCAGGAGCTGGACATCAACAGACTGAGCGACT |
| | | ACGACGTGGACGCCATCGTGCCCCAGAGCTTCCTGAAGGACGACAGCATCGACAACAAG |
| | | GTGCTGACCAGAAGCGACAAGAACAGAGGCAAGAGCGACAACGTGCCCAGCGAGGAGGT |
| | | GGTGAAGAAGATGAAGAACTACTGGAGACAGCTGCTGAACGCCAAGCTGATCACCCAGA |
| | | GAAAGTTCGACAACCTGACCAAGGCCGAGAGAGGCGGCCTGAGCGAGCTGGACAAGGCC |
| | | GGCTTCATCAAGAGACAGCTGGTGGAGACCAGACAGATCACCAAGCACGTGGCCCAGAT |
| | | CCTGGACAGCAGAATGAACACCAAGTACGACGAGAACGACAAGCTGATCAGAGAGGTGA |
| | | AGGTGATCACCCTGAAGAGTAAGCTGGTGAGCGACTTCAGAAAGGACTTCCAGTTCTAC |
| | | AAGGTGAGAGAGATCAACAACTACCACCACGCCCACGACGCCTACCTGAACGCCGTGGT |
| | | GGGCACCGCCCTGATCAAGAAGTACCCCAAGCTGGAGAGCGAGTTCGTGTACGGCGACT |
| | | ACAAGGTGTACGACGTGAGAAAGATGATCGCCAAGAGCGAGCAGGAGATCGGCAAGGCC |
| | | ACCGCCAAGTACTTCTTCTACAGCAACATCATGAACTTCTTCAAGACCGAGATCACCCT |
| | | GGCCAACGGCGAGATCAGAAAGAGACCCCTGATCGAGACCAACGGCGAGACCGGCGAGA |
| | | TCGTGTGGGACAAGGGCAGAGACTTCGCCACCGTGAGAAAGGTGCTGAGCATGCCCCAG |
| | | GTGAACATCGTGAAGAAGACCGAGGTGCAGACCGGCGGCTTCAGCAAGGAGAGCATCCT |
| | | GCCCAAGAGAAACAGCGACAAGCTGATCGCCAGAAAGAAGGACTGGGACCCCAAGAAGT |
| | | ACGGCGGCTTCGACAGCCCCACCGTGGCCTACAGCGTGCTGGTGGTGGCCAAGGTGGAG |
| | | AAGGGCAAGAGCAAGAAGCTGAAGAGTGTGAAGGAGCTGCTGGGCATCACCATCATGGA |
| | | GAGAAGCAGCTTCGAGAAGAACCCCATCGACTTCCTGGAGGCCAAGGGCTACAAGGAGG |
| | | TGAAGAAGGACCTGATCATCAAGCTGCCCAAGTACAGCCTGTTCGAGCTGGAGAACGGC |
| | | AGAAAGAGAATGCTGGCCAGCGCCGGCGAGCTGCAGAAGGGCAACGAGCTGGCCCTGCC |
| | | CAGCAAGTACGTGAACTTCCTGTACCTGGCCAGCCACTACGAGAAGCTGAAGGGCAGCC |
| | | CCGAGGACAACGAGCAGAAGCAGCTGTTCGTGGAGCAGCACAAGCACTACCTGGACGAG |
| | | ATCATCGAGCAGATCAGCGAGTTCAGCAAGAGAGTGATCCTGGCCGACGCCAACCTGGA |
| | | CAAGGTGCTGAGCGCCTACAACAAGCACAGAGACAAGCCCATCAGAGAGCAGGCCGAGA |
| | | ACATCATCCACCTGTTCACCCTGACCAACCTGGGCGCCCCCGCCGCCTTCAAGTACTTC |
| | | GACACCACCATCGACAGAAAGAGATACACCAGCACCAAGGAGGTGCTGGACGCCACCCT |
| | | GATCCACCAGAGCATCACCGGCCTGTACGAGACCAGAATCGACCTGAGCCAGCTGGGCG |
| | | GCGACAGCGGCGGCAGCAGCGGCGGCAGCAGCGGCAGCGAGACCCCCGGCACCAGCGAG |
| | | AGCGCCACCCCCGAGAGCAGCGGCGGCAGCAGCGGCGGCAGCAGCACCCTGAACATCGA |
| | | GGACGAGTACAGACTGCACGAGACCAGCAAGGAGCCCGACGTGAGCCTGGGCAGCACCT |
| | | GGCTGAGCGACTTCCCCCAGGCCTGGGCCGAGACCGGCGGCATGGGCCTGGCCGTGAGA |
| | | CAGGCCCCCCTGATCATCCCCCTGAAGGCCACCAGCACCCCCGTGAGCATCAAGCAGTA |
| | | CCCCATGAGCCAGGAGGCCAGACTGGGCATCAAGCCCCACATCCAGAGACTGCTGGACC |
| | | AGGGCATCCTGGTGCCCTGCCAGAGCCCCTGGAACACCCCCCTGCTGCCCGTGAAGAAG |
| | | CCCGGCACCAACGACTACAGACCCGTGCAGGACCTGAGAGAGGTGAACAAGAGAGTGGA |
| | | GGACATCCACCCCACCGTGCCCAACCCCTACAACCTGCTGAGCGGCCTGCCCCCCAGCC |
| | | ACCAGTGGTACACCGTGCTGGACCTGAAGGACGCCTTCTTCTGCCTGAGACTGCACCCC |
| | | ACCAGCCAGCCCCTGTTCGCCTTCGAGTGGAGAGACCCCGAGATGGGCATCAGCGGCCA |
| | | GCTGACCTGGACCAGACTGCCCCAGGGCTTCAAGAACAGCCCCACCCTGTTCAACGAGG |
| | | CCCTGCACAGAGACCTGGCCGACTTCAGAATCCAGCACCCCGACCTGATCCTGCTGCAG |
| | | TACGTGGACGACCTGCTGCTGGCCGCCACCAGCGAGCTGGACTGCCAGCAGGGCACCAG |
| | | AGCCCTGCTGCAGACCCTGGGCAACCTGGGCTACAGAGCCAGCGCCAAGAAGGCCCAGA |
| | | TCTGCCAGAAGCAGGTGAAGTACCTGGGCTACCTGCTGAAGGAGGGCCAGAGATGGCTG |
| | | ACCGAGGCCAGAAAGGAGACCGTGATGGGCCAGCCCACCCCCAAGACCCCCAGACAGCT |
| | | GAGAGAGTTCCTGGGCAAGGCCGGCTTCTGCAGACTGTTCATCCCCGGCTTCGCCGAGA |
| | | TGGCCGCCCCCCTGTACCCCCTGACCAAGCCCGGCACCCTGTTCAACTGGGGCCCCGAC |
| | | CAGCAGAAGGCCTACCAGGAGATCAAGCAGGCCCTGCTGACCGCCCCCGCCCTGGGCCT |
| | | GCCCGACCTGACCAAGCCCTTCGAGCTGTTCGTGGACGAGAAGCAGGGCTACGCCAAGG |
| | | GCGTGCTGACCCAGAAGCTGGGCCCCTGGAGAAGACCCGTGGCCTACCTGAGCAAGAAG |
| | | CTGGACCCCGTGGCCGCCGGCTGGCCCCCCTGCCTGAGAATGGTGGCCGCCATCGCCGT |
| | | GCTGACCAAGGACGCCGGCAAGCTGACCATGGGCCAGCCCCTGGTGATCCTGGCCCCCC |
| | | ACGCCGTGGAGGCCCTGGTGAAGCAGCCCCCCGACAGATGGCTGAGCAACGCCAGAATG |
| | | ACCCACTACCAGGCCCTGCTGCTGGACACCGACAGAGTGCAGTTCGGCCCCGTGGTGGC |
| | | CCTGAACCCCGCCACCCTGCTGCCCCTGCCCGAGGAGGGCCTGCAGCACAACTGCCTGG |
| | | ACATCCTGGCCGAGGCCCACGGCACCAGACCCGACCTGACCGACCAGCCCCTGCCCGAC |
| | | GCCGACCACACCTGGTACACCGACGGCAGCAGCCTGCTGCAGGAGGGCCAGAGAAAGGC |
| | | CGGCGCCGCCGTGACCACCGAGACCGAGGTGATCTGGGCCAAGGCCCTGCCCGCCGGCA |
| | | CCAGCGCCCAGAGAGCCGAGCTGATCGCCCTGACCCAGGCCCTGAAGATGGCCGAGGGC |
| | | AAGAAGCTGAACGTGTACACCGACAGCAGATACGCCTTCGCCACCGCCCACATCCACGG |
| | | CGAGATCTACAGAAGAAGAGGCTGGCTGACCAGCGAGGGCAAGGAGATCAAGAACAAGG |
| | | ACGAGATCCTGGCCCTGCTGAAGGCCCTGTTCCTGCCCAAGAGACTGAGCATCATCCAC |
| | | TGCCCCGGCCACCAGAAGGGCCACAGCGCCGAGGCCAGAGGCAACAGAATGGCCGACCA |
| | | GGCCGCCAGAAAGGCCGCCATCACCGAGACCCCCGACACCAGCACCCTGCTGATCGAGA |
| | | ACAGCAGCCCCAGCGGCGGCAGCAAGAGAACCGCCGACGGCAGCGAGTTCGAGCCCAAG |
| | | AAGAAGAGAAAGGTGTGA |
| 635 | PL1933 | MPAAKRVKLDGGSRALWVIRLSRVTDATTSPERQLESCQQLCAQRGWDVVGVAEDLDVS |
| | _AA | GAVDPFDRKRRPNLARWLAFEEQPFDVIVAYRVDRLTRSIRHLQQLVHWAEDHKKLVVS |
| | | ATEAHFDTTTPFAAVVIALMGTVAQMELEAIKERNRSAAHFNIRAGKYRGSLPPWGYLP |
| | | TRVDGEWRLVPDPVQRERILEVYHRWVDNHEPLHLVAHDLNRRGVLSPKDYFAQLQGRE |
| | | PQGREWSATALKRSMISEAMLGYATLNGKTVRDDDGAPLVRAEPILTREQLEALRAELV |
| | | KTSRAKPAVSTPSLLLRVLFCAVCGEPAYKFAGGGRKHPRYRCRSMGFPKHCGNGTVAM |
| | | AEWDAFCEEQVLDLLGDAERLEKVWVAGSDSAVELAEVNAELVDLTSLIGSPAYRAGSP |
| | | QREALDARIAALAARQEELEGLEARPSGWEWRETGQRFGDWWREQDTAAKNTWLRSMNV |
| | | RLTFDVRGGLTRTIDFGDLQEYEQHLRLGSVVERLHTGMSGGSPKKKRKVGSGATNFSL |
| | | LKQAGDVEENPGPKRTADGSEFESPKKKRKVDKKYSIGLDIGTNSVGWAVITDEYKVPS |
| | | KKFKVLGNTDRHSIKKNLIGALLFDSGETAEATRLKRTARRRYTRRKNRICYLQEIFSN |
| | | EMAKVDDSFFHRLEESFLVEEDKKHERHPIFGNIVDEVAYHEKYPTIYHLRKKLVDSTD |
| | | KADLRLIYLALAHMIKFRGHFLIEGDLNPDNSDVDKLFIQLVQTYNQLFEENPINASGV |
| | | DAKAILSARLSKSRRLENLIAQLPGEKKNGLFGNLIALSLGLTPNFKSNFDLAEDAKLQ |
| | | LSKDTYDDDLDNLLAQIGDQYADLFLAAKNLSDAILLSDILRVNTEITKAPLSASMIKR |
| | | YDEHHQDLTLLKALVRQQLPEKYKEIFFDQSKNGYAGYIDGGASQEEFYKFIKPILEKM |
| | | DGTEELLVKLNREDLLRKQRTFDNGSIPHQIHLGELHAILRRQEDFYPFLKDNREKIEK |
| | | ILTFRIPYYVGPLARGNSRFAWMTRKSEETITPWNFEEVVDKGASAQSFIERMTNFDKN |
| | | LPNEKVLPKHSLLYEYFTVYNELTKVKYVTEGMRKPAFLSGEQKKAIVDLLFKTNRKVT |
| | | VKQLKEDYFKKIECFDSVEISGVEDRFNASLGTYHDLLKIIKDKDFLDNEENEDILEDI |
| | | VLTLTLFEDREMIEERLKTYAHLFDDKVMKQLKRRRYTGWGRLSRKLINGIRDKQSGKT |
| | | ILDFLKSDGFANRNFMQLIHDDSLTFKEDIQKAQVSGQGDSLHEHIANLAGSPAIKKGI |
| | | LQTVKVVDELVKVMGRHKPENIVIEMARENQTTQKGQKNSRERMKRIEEGIKELGSQIL |
| | | KEHPVENTQLQNEKLYLYYLQNGRDMYVDQELDINRLSDYDVDAIVPQSFLKDDSIDNK |
| | | VLTRSDKNRGKSDNVPSEEVVKKMKNYWRQLLNAKLITQRKFDNLTKAERGGLSELDKA |
| | | GFIKRQLVETRQITKHVAQILDSRMNTKYDENDKLIREVKVITLKSKLVSDFRKDFQFY |
| | | KVREINNYHHAHDAYLNAVVGTALIKKYPKLESEFVYGDYKVYDVRKMIAKSEQEIGKA |
| | | TAKYFFYSNIMNFFKTEITLANGEIRKRPLIETNGETGEIVWDKGRDFATVRKVLSMPQ |
| | | VNIVKKTEVQTGGFSKESILPKRNSDKLIARKKDWDPKKYGGFDSPTVAYSVLVVAKVE |
| | | KGKSKKLKSVKELLGITIMERSSFEKNPIDFLEAKGYKEVKKDLIIKLPKYSLFELENG |
| | | RKRMLASAGELQKGNELALPSKYVNFLYLASHYEKLKGSPEDNEQKQLFVEQHKHYLDE |
| | | IIEQISEFSKRVILADANLDKVLSAYNKHRDKPIREQAENIIHLFTLTNLGAPAAFKYF |
| | | DTTIDRKRYTSTKEVLDATLIHQSITGLYETRIDLSQLGGDSGGSSGGSSGSETPGTSE |
| | | SATPESSGGSSGGSSTLNIEDEYRLHETSKEPDVSLGSTWLSDFPQAWAETGGMGLAVR |
| | | QAPLIIPLKATSTPVSIKQYPMSQEARLGIKPHIQRLLDQGILVPCQSPWNTPLLPVKK |
| | | PGTNDYRPVQDLREVNKRVEDIHPTVPNPYNLLSGLPPSHQWYTVLDLKDAFFCLRLHP |
| | | TSQPLFAFEWRDPEMGISGQLTWTRLPQGFKNSPTLFNEALHRDLADFRIQHPDLILLQ |
| | | YVDDLLLAATSELDCQQGTRALLQTLGNLGYRASAKKAQICQKQVKYLGYLLKEGQRWL |
| | | TEARKETVMGQPTPKTPRQLREFLGKAGFCRLFIPGFAEMAAPLYPLTKPGTLFNWGPD |
| | | QQKAYQEIKQALLTAPALGLPDLTKPFELFVDEKQGYAKGVLTQKLGPWRRPVAYLSKK |
| | | LDPVAAGWPPCLRMVAAIAVLTKDAGKLTMGQPLVILAPHAVEALVKQPPDRWLSNARM |
| | | THYQALLLDTDRVQFGPVVALNPATLLPLPEEGLQHNCLDILAEAHGTRPDLTDQPLPD |
| | | ADHTWYTDGSSLLQEGQRKAGAAVTTETEVIWAKALPAGTSAQRAELIALTQALKMAEG |
| | | KKLNVYTDSRYAFATAHIHGEIYRRRGWLTSEGKEIKNKDEILALLKALFLPKRLSIIH |
| | | CPGHQKGHSAEARGNRMADQAARKAAITETPDTSTLLIENSSPSGGSKRTADGSEFEPK |
| | | KKRKV* |
| 636 | PL1933_ | ATGcctgctgctaagagagtgaaactggatggcggcagcAGAGCCCTGGTGGTGATCAG |
| | DNA | ACTGAGCAGAGTGACCGACGCCACCACCAGCCCCGAGAGACAGCTGGAGAGCTGCCAGC |
| | | AGCTGTGCGCCCAGAGAGGCTGGGACGTGGTGGGCGTGGCCGAGGACCTGGACGTGAGC |
| | | GGCGCCGTGGACCCCTTCGACAGAAAGAGAAGACCCAACCTGGCCAGATGGCTGGCCTT |
| | | CGAGGAGCAGCCCTTCGACGTGATCGTGGCCTACAGAGTGGACAGACTGACCAGAAGCA |
| | | TCAGACACCTGCAGCAGCTGGTGCACTGGGCCGAGGACCACAAGAAGCTGGTGGTGAGC |
| | | GCCACCGAGGCCCACTTCGACACCACCACCCCCTTCGCCGCCGTGGTGATCGCCCTGAT |
| | | GGGCACCGTGGCCCAGATGGAGCTGGAGGCCATCAAGGAGAGAAACAGAAGCGCCGCCC |
| | | ACTTCAACATCAGAGCCGGCAAGTACAGAGGCAGCCTGCCCCCCTGGGGCTACCTGCCC |
| | | ACCAGAGTGGACGGCGAGTGGAGACTGGTGCCCGACCCCGTGCAGAGAGAGAGAATCCT |
| | | GGAGGTGTACCACAGAGTGGTGGACAACCACGAGCCCCTGCACCTGGTGGCCCACGACC |
| | | TGAACAGAAGAGGCGTGCTGAGCCCCAAGGACTACTTCGCCCAGCTGCAGGGCAGAGAG |
| | | CCCCAGGGCAGAGAGTGGAGCGCCACCGCCCTGAAGAGAAGCATGATCAGCGAGGCCAT |
| | | GCTGGGCTACGCCACCCTGAACGGCAAGACCGTGAGAGACGACGACGGCGCCCCCCTGG |
| | | TGAGAGCCGAGCCCATCCTGACCAGAGAGCAGCTGGAGGCCCTGAGAGCCGAGCTGGTG |
| | | AAGACCAGCAGAGCCAAGCCCGCCGTGAGCACCCCCAGCCTGCTGCTGAGAGTGCTGTT |
| | | CTGCGCCGTGTGCGGCGAGCCCGCCTACAAGTTCGCCGGGGGGGGCAGAAAGCACCCCA |
| | | GATACAGATGCAGAAGCATGGGCTTCCCCAAGCACTGCGGCAACGGCACCGTGGCCATG |
| | | GCCGAGTGGGACGCCTTCTGCGAGGAGCAGGTGCTGGACCTGCTGGGCGACGCCGAGAG |
| | | ACTGGAGAAGGTGTGGGTGGCCGGCAGCGACAGCGCCGTGGAGCTGGCCGAGGTGAACG |
| | | CCGAGCTGGTGGACCTGACCAGCCTGATCGGCAGCCCCGCCTACAGAGCCGGCAGCCCC |
| | | CAGAGAGAGGCCCTGGACGCCAGAATCGCCGCCCTGGCCGCCAGACAGGAGGAGCTGGA |
| | | GGGCCTGGAGGCCAGACCCAGCGGCTGGGAGTGGAGAGAGACCGGCCAGAGATTCGGCG |
| | | ACTGGTGGAGAGAGCAGGACACCGCCGCCAAGAACACCTGGCTGAGAAGCATGAACGTG |
| | | AGACTGACCTTCGACGTGAGAGGCGGCCTGACCAGAACCATCGACTTCGGCGACCTGCA |
| | | GGAGTACGAGCAGCACCTGAGACTGGGCAGCGTGGTGGAGAGACTGCACACCGGCATGA |
| | | GCGGCGGCAGCCCCAAGAAGAAGAGAAAGGTGGGCAGCGGCGCCACCAACTTCAGCCTG |
| | | CTGAAGCAGGCCGGCGACGTGGAGGAGAACCCCGGCCCCAAGAGAACCGCCGACGGCAG |
| | | CGAGTTCGAGAGCCCCAAGAAGAAGAGAAAGGTGGACAAGAAGTACAGCATCGGCCTGG |
| | | ACATCGGCACCAACAGCGTGGGCTGGGCCGTGATCACCGACGAGTACAAGGTGCCCAGC |
| | | AAGAAGTTCAAGGTGCTGGGCAACACCGACAGACACAGCATCAAGAAGAACCTGATCGG |
| | | CGCCCTGCTGTTCGACAGCGGCGAGACCGCCGAGGCCACCAGACTGAAGAGAACCGCCA |
| | | GAAGAAGATACACCAGAAGAAAGAACAGAATCTGCTACCTGCAGGAGATCTTCAGCAAC |
| | | GAGATGGCCAAGGTGGACGACAGCTTCTTCCACAGACTGGAGGAGAGCTTCCTGGTGGA |
| | | GGAGGACAAGAAGCACGAGAGACACCCCATCTTCGGCAACATCGTGGACGAGGTGGCCT |
| | | ACCACGAGAAGTACCCCACCATCTACCACCTGAGAAAGAAGCTGGTGGACAGCACCGAC |
| | | AAGGCCGACCTGAGACTGATCTACCTGGCCCTGGCCCACATGATCAAGTTCAGAGGCCA |
| | | CTTCCTGATCGAGGGCGACCTGAACCCCGACAACAGCGACGTGGACAAGCTGTTCATCC |
| | | AGCTGGTGCAGACCTACAACCAGCTGTTCGAGGAGAACCCCATCAACGCCAGCGGCGTG |
| | | GACGCCAAGGCCATCCTGAGCGCCAGACTGAGCAAGAGCAGAAGACTGGAGAACCTGAT |
| | | CGCCCAGCTGCCCGGCGAGAAGAAGAACGGCCTGTTCGGCAACCTGATCGCCCTGAGCC |
| | | TGGGCCTGACCCCCAACTTCAAGAGCAACTTCGACCTGGCCGAGGACGCCAAGCTGCAG |
| | | CTGAGCAAGGACACCTACGACGACGACCTGGACAACCTGCTGGCCCAGATCGGCGACCA |
| | | GTACGCCGACCTGTTCCTGGCCGCCAAGAACCTGAGCGACGCCATCCTGCTGAGCGACA |
| | | TCCTGAGAGTGAACACCGAGATCACCAAGGCCCCCCTGAGCGCCAGCATGATCAAGAGA |
| | | TACGACGAGCACCACCAGGACCTGACCCTGCTGAAGGCCCTGGTGAGACAGCAGCTGCC |
| | | CGAGAAGTACAAGGAGATCTTCTTCGACCAGAGCAAGAACGGCTACGCCGGCTACATCG |
| | | ACGGCGGCGCCAGCCAGGAGGAGTTCTACAAGTTCATCAAGCCCATCCTGGAGAAGATG |
| | | GACGGCACCGAGGAGCTGCTGGTGAAGCTGAACAGAGAGGACCTGCTGAGAAAGCAGAG |
| | | AACCTTCGACAACGGCAGCATCCCCCACCAGATCCACCTGGGCGAGCTGCACGCCATCC |
| | | TGAGAAGACAGGAGGACTTCTACCCCTTCCTGAAGGACAACAGAGAGAAGATCGAGAAG |
| | | ATCCTGACCTTCAGAATCCCCTACTACGTGGGCCCCCTGGCCAGAGGCAACAGCAGATT |
| | | CGCCTGGATGACCAGAAAGAGCGAGGAGACCATCACCCCCTGGAACTTCGAGGAGGTGG |
| | | TGGACAAGGGCGCCAGCGCCCAGAGCTTCATCGAGAGAATGACCAACTTCGACAAGAAC |
| | | CTGCCCAACGAGAAGGTGCTGCCCAAGCACAGCCTGCTGTACGAGTACTTCACCGTGTA |
| | | CAACGAGCTGACCAAGGTGAAGTACGTGACCGAGGGCATGAGAAAGCCCGCCTTCCTGA |
| | | GCGGCGAGCAGAAGAAGGCCATCGTGGACCTGCTGTTCAAGACCAACAGAAAGGTGACC |
| | | GTGAAGCAGCTGAAGGAGGACTACTTCAAGAAGATCGAGTGCTTCGACAGCGTGGAGAT |
| | | CAGCGGCGTGGAGGACAGATTCAACGCCAGCCTGGGCACCTACCACGACCTGCTGAAGA |
| | | TCATCAAGGACAAGGACTTCCTGGACAACGAGGAGAACGAGGACATCCTGGAGGACATC |
| | | GTGCTGACCCTGACCCTGTTCGAGGACAGAGAGATGATCGAGGAGAGACTGAAGACCTA |
| | | CGCCCACCTGTTCGACGACAAGGTGATGAAGCAGCTGAAGAGAAGAAGATACACCGGCT |
| | | GGGGCAGACTGAGCAGAAAGCTGATCAACGGCATCAGAGACAAGCAGAGCGGCAAGACC |
| | | ATCCTGGACTTCCTGAAGAGTGACGGCTTCGCCAACAGAAACTTCATGCAGCTGATCCA |
| | | CGACGACAGCCTGACCTTCAAGGAGGACATCCAGAAGGCCCAGGTGAGCGGCCAGGGCG |
| | | ACAGCCTGCACGAGCACATCGCCAACCTGGCCGGCAGCCCCGCCATCAAGAAGGGCATC |
| | | CTGCAGACCGTGAAGGTGGTGGACGAGCTGGTGAAGGTGATGGGCAGACACAAGCCCGA |
| | | GAACATCGTGATCGAGATGGCCAGAGAGAACCAGACCACCCAGAAGGGCCAGAAGAACA |
| | | GCAGAGAGAGAATGAAGAGAATCGAGGAGGGCATCAAGGAGCTGGGCAGCCAGATCCTG |
| | | AAGGAGCACCCCGTGGAGAACACCCAGCTGCAGAACGAGAAGCTGTACCTGTACTACCT |
| | | GCAGAACGGCAGAGACATGTACGTGGACCAGGAGCTGGACATCAACAGACTGAGCGACT |
| | | ACGACGTGGACGCCATCGTGCCCCAGAGCTTCCTGAAGGACGACAGCATCGACAACAAG |
| | | GTGCTGACCAGAAGCGACAAGAACAGAGGCAAGAGCGACAACGTGCCCAGCGAGGAGGT |
| | | GGTGAAGAAGATGAAGAACTACTGGAGACAGCTGCTGAACGCCAAGCTGATCACCCAGA |
| | | GAAAGTTCGACAACCTGACCAAGGCCGAGAGAGGCGGCCTGAGCGAGCTGGACAAGGCC |
| | | GGCTTCATCAAGAGACAGCTGGTGGAGACCAGACAGATCACCAAGCACGTGGCCCAGAT |
| | | CCTGGACAGCAGAATGAACACCAAGTACGACGAGAACGACAAGCTGATCAGAGAGGTGA |
| | | AGGTGATCACCCTGAAGAGTAAGCTGGTGAGCGACTTCAGAAAGGACTTCCAGTTCTAC |
| | | AAGGTGAGAGAGATCAACAACTACCACCACGCCCACGACGCCTACCTGAACGCCGTGGT |
| | | GGGCACCGCCCTGATCAAGAAGTACCCCAAGCTGGAGAGCGAGTTCGTGTACGGCGACT |
| | | ACAAGGTGTACGACGTGAGAAAGATGATCGCCAAGAGCGAGCAGGAGATCGGCAAGGCC |
| | | ACCGCCAAGTACTTCTTCTACAGCAACATCATGAACTTCTTCAAGACCGAGATCACCCT |
| | | GGCCAACGGCGAGATCAGAAAGAGACCCCTGATCGAGACCAACGGCGAGACCGGCGAGA |
| | | TCGTGTGGGACAAGGGCAGAGACTTCGCCACCGTGAGAAAGGTGCTGAGCATGCCCCAG |
| | | GTGAACATCGTGAAGAAGACCGAGGTGCAGACCGGCGGCTTCAGCAAGGAGAGCATCCT |
| | | GCCCAAGAGAAACAGCGACAAGCTGATCGCCAGAAAGAAGGACTGGGACCCCAAGAAGT |
| | | ACGGCGGCTTCGACAGCCCCACCGTGGCCTACAGCGTGCTGGTGGTGGCCAAGGTGGAG |
| | | AAGGGCAAGAGCAAGAAGCTGAAGAGTGTGAAGGAGCTGCTGGGCATCACCATCATGGA |
| | | GAGAAGCAGCTTCGAGAAGAACCCCATCGACTTCCTGGAGGCCAAGGGCTACAAGGAGG |
| | | TGAAGAAGGACCTGATCATCAAGCTGCCCAAGTACAGCCTGTTCGAGCTGGAGAACGGC |
| | | AGAAAGAGAATGCTGGCCAGCGCCGGCGAGCTGCAGAAGGGCAACGAGCTGGCCCTGCC |
| | | CAGCAAGTACGTGAACTTCCTGTACCTGGCCAGCCACTACGAGAAGCTGAAGGGCAGCC |
| | | CCGAGGACAACGAGCAGAAGCAGCTGTTCGTGGAGCAGCACAAGCACTACCTGGACGAG |
| | | ATCATCGAGCAGATCAGCGAGTTCAGCAAGAGAGTGATCCTGGCCGACGCCAACCTGGA |
| | | CAAGGTGCTGAGCGCCTACAACAAGCACAGAGACAAGCCCATCAGAGAGCAGGCCGAGA |
| | | ACATCATCCACCTGTTCACCCTGACCAACCTGGGCGCCCCCGCCGCCTTCAAGTACTTC |
| | | GACACCACCATCGACAGAAAGAGATACACCAGCACCAAGGAGGTGCTGGACGCCACCCT |
| | | GATCCACCAGAGCATCACCGGCCTGTACGAGACCAGAATCGACCTGAGCCAGCTGGGCG |
| | | GCGACAGCGGCGGCAGCAGCGGCGGCAGCAGCGGCAGCGAGACCCCCGGCACCAGCGAG |
| | | AGCGCCACCCCCGAGAGCAGCGGCGGCAGCAGCGGCGGCAGCAGCACCCTGAACATCGA |
| | | GGACGAGTACAGACTGCACGAGACCAGCAAGGAGCCCGACGTGAGCCTGGGCAGCACCT |
| | | GGCTGAGCGACTTCCCCCAGGCCTGGGCCGAGACCGGCGGCATGGGCCTGGCCGTGAGA |
| | | CAGGCCCCCCTGATCATCCCCCTGAAGGCCACCAGCACCCCCGTGAGCATCAAGCAGTA |
| | | CCCCATGAGCCAGGAGGCCAGACTGGGCATCAAGCCCCACATCCAGAGACTGCTGGACC |
| | | AGGGCATCCTGGTGCCCTGCCAGAGCCCCTGGAACACCCCCCTGCTGCCCGTGAAGAAG |
| | | CCCGGCACCAACGACTACAGACCCGTGCAGGACCTGAGAGAGGTGAACAAGAGAGTGGA |
| | | GGACATCCACCCCACCGTGCCCAACCCCTACAACCTGCTGAGCGGCCTGCCCCCCAGCC |
| | | ACCAGTGGTACACCGTGCTGGACCTGAAGGACGCCTTCTTCTGCCTGAGACTGCACCCC |
| | | ACCAGCCAGCCCCTGTTCGCCTTCGAGTGGAGAGACCCCGAGATGGGCATCAGCGGCCA |
| | | GCTGACCTGGACCAGACTGCCCCAGGGCTTCAAGAACAGCCCCACCCTGTTCAACGAGG |
| | | CCCTGCACAGAGACCTGGCCGACTTCAGAATCCAGCACCCCGACCTGATCCTGCTGCAG |
| | | TACGTGGACGACCTGCTGCTGGCCGCCACCAGCGAGCTGGACTGCCAGCAGGGCACCAG |
| | | AGCCCTGCTGCAGACCCTGGGCAACCTGGGCTACAGAGCCAGCGCCAAGAAGGCCCAGA |
| | | TCTGCCAGAAGCAGGTGAAGTACCTGGGCTACCTGCTGAAGGAGGGCCAGAGATGGCTG |
| | | ACCGAGGCCAGAAAGGAGACCGTGATGGGCCAGCCCACCCCCAAGACCCCCAGACAGCT |
| | | GAGAGAGTTCCTGGGCAAGGCCGGCTTCTGCAGACTGTTCATCCCCGGCTTCGCCGAGA |
| | | TGGCCGCCCCCCTGTACCCCCTGACCAAGCCCGGCACCCTGTTCAACTGGGGCCCCGAC |
| | | CAGCAGAAGGCCTACCAGGAGATCAAGCAGGCCCTGCTGACCGCCCCCGCCCTGGGCCT |
| | | GCCCGACCTGACCAAGCCCTTCGAGCTGTTCGTGGACGAGAAGCAGGGCTACGCCAAGG |
| | | GCGTGCTGACCCAGAAGCTGGGCCCCTGGAGAAGACCCGTGGCCTACCTGAGCAAGAAG |
| | | CTGGACCCCGTGGCCGCCGGCTGGCCCCCCTGCCTGAGAATGGTGGCCGCCATCGCCGT |
| | | GCTGACCAAGGACGCCGGCAAGCTGACCATGGGCCAGCCCCTGGTGATCCTGGCCCCCC |
| | | ACGCCGTGGAGGCCCTGGTGAAGCAGCCCCCCGACAGATGGCTGAGCAACGCCAGAATG |
| | | ACCCACTACCAGGCCCTGCTGCTGGACACCGACAGAGTGCAGTTCGGCCCCGTGGTGGC |
| | | CCTGAACCCCGCCACCCTGCTGCCCCTGCCCGAGGAGGGCCTGCAGCACAACTGCCTGG |
| | | ACATCCTGGCCGAGGCCCACGGCACCAGACCCGACCTGACCGACCAGCCCCTGCCCGAC |
| | | GCCGACCACACCTGGTACACCGACGGCAGCAGCCTGCTGCAGGAGGGCCAGAGAAAGGC |
| | | CGGCGCCGCCGTGACCACCGAGACCGAGGTGATCTGGGCCAAGGCCCTGCCCGCCGGCA |
| | | CCAGCGCCCAGAGAGCCGAGCTGATCGCCCTGACCCAGGCCCTGAAGATGGCCGAGGGC |
| | | AAGAAGCTGAACGTGTACACCGACAGCAGATACGCCTTCGCCACCGCCCACATCCACGG |
| | | CGAGATCTACAGAAGAAGAGGCTGGCTGACCAGCGAGGGCAAGGAGATCAAGAACAAGG |
| | | ACGAGATCCTGGCCCTGCTGAAGGCCCTGTTCCTGCCCAAGAGACTGAGCATCATCCAC |
| | | TGCCCCGGCCACCAGAAGGGCCACAGCGCCGAGGCCAGAGGCAACAGAATGGCCGACCA |
| | | GGCCGCCAGAAAGGCCGCCATCACCGAGACCCCCGACACCAGCACCCTGCTGATCGAGA |
| | | ACAGCAGCCCCAGCGGCGGCAGCAAGAGAACCGCCGACGGCAGCGAGTTCGAGCCCAAG |
| | | AAGAAGAGAAAGGTGTGA |
| 637 | PL1934 | MPAAKRVKLDGGSKDKKSDGKDSQKKGSRALWIRLSRVTDATTSPERQLESCQQLCAQR |
| | _AA | GWDVVGVAEDLDVSGAVDPFDRKRRPNLARWLAFEEQPFDVIVAYRVDRLTRSIRHLQQ |
| | | LVHWAEDHKKLVVSATEAHFDTTTPFAAVVIALMGTVAQMELEAIKERNRSAAHFNIRA |
| | | GKYRGSLPPWGYLPTRVDGEWRLVPDPVQRERILEVYHRWVDNHEPLHLVAHDLNRRGV |
| | | LSPKDYFAQLQGREPQGREWSATALKRSMISEAMLGYATLNGKTVRDDDGAPLVRAEPI |
| | | LTREQLEALRAELVKTSRAKPAVSTPSLLLRVLFCAVCGEPAYKFAGGGRKHPRYRCRS |
| | | MGFPKHCGNGTVAMAEWDAFCEEQVLDLLGDAERLEKVWVAGSDSAVELAEVNAELVDL |
| | | TSLIGSPAYRAGSPQREALDARIAALAARQEELEGLEARPSGWEWRETGQRFGDWWREQ |
| | | DTAAKNTWLRSMNVRLTFDVRGGLTRTIDFGDLQEYEQHLRLGSVVERLHTGMSGGSPK |
| | | KKRKVGSGATNFSLLKQAGDVEENPGPKRTADGSEFESPKKKRKVDKKYSIGLDIGTNS |
| | | VGWAVITDEYKVPSKKFKVLGNTDRHSIKKNLIGALLFDSGETAEATRLKRTARRRYTR |
| | | RKNRICYLQEIFSNEMAKVDDSFFHRLEESFLVEEDKKHERHPIFGNIVDEVAYHEKYP |
| | | TIYHLRKKLVDSTDKADLRLIYLALAHMIKFRGHFLIEGDLNPDNSDVDKLFIQLVQTY |
| | | NQLFEENPINASGVDAKAILSARLSKSRRLENLIAQLPGEKKNGLFGNLIALSLGLTPN |
| | | FKSNFDLAEDAKLQLSKDTYDDDLDNLLAQIGDQYADLFLAAKNLSDAILLSDILRVNT |
| | | EITKAPLSASMIKRYDEHHQDLTLLKALVRQQLPEKYKEIFFDQSKNGYAGYIDGGASQ |
| | | EEFYKFIKPILEKMDGTEELLVKLNREDLLRKQRTFDNGSIPHQIHLGELHAILRRQED |
| | | FYPFLKDNREKIEKILTFRIPYYVGPLARGNSRFAWMTRKSEETITPWNFEEVVDKGAS |
| | | AQSFIERMTNFDKNLPNEKVLPKHSLLYEYFTVYNELTKVKYVTEGMRKPAFLSGEQKK |
| | | AIVDLLFKTNRKVTVKQLKEDYFKKIECFDSVEISGVEDRFNASLGTYHDLLKIIKDKD |
| | | FLDNEENEDILEDIVLTLTLFEDREMIEERLKTYAHLFDDKVMKQLKRRRYTGWGRLSR |
| | | KLINGIRDKQSGKTILDFLKSDGFANRNFMQLIHDDSLTFKEDIQKAQVSGQGDSLHEH |
| | | IANLAGSPAIKKGILQTVKWVDELVKVMGRHKPENIVIEMARENQTTQKGQKNSRERMK |
| | | RIEEGIKELGSQILKEHPVENTQLQNEKLYLYYLQNGRDMYVDQELDINRLSDYDVDAI |
| | | VPQSFLKDDSIDNKVLTRSDKNRGKSDNVPSEEVVKKMKNYWRQLLNAKLITQRKFDNL |
| | | TKAERGGLSELDKAGFIKRQLVETRQITKHVAQILDSRMNTKYDENDKLIREVKVITLK |
| | | SKLVSDFRKDFQFYKVREINNYHHAHDAYLNAVVGTALIKKYPKLESEFVYGDYKVYDV |
| | | RKMIAKSEQEIGKATAKYFFYSNIMNFFKTEITLANGEIRKRPLIETNGETGEIVWDKG |
| | | RDFATVRKVLSMPQVNIVKKTEVQTGGFSKESILPKRNSDKLIARKKDWDPKKYGGFDS |
| | | PTVAYSVLVVAKVEKGKSKKLKSVKELLGITIMERSSFEKNPIDFLEAKGYKEVKKDLI |
| | | IKLPKYSLFELENGRKRMLASAGELQKGNELALPSKYVNFLYLASHYEKLKGSPEDNEQ |
| | | KQLFVEQHKHYLDEIIEQISEFSKRVILADANLDKVLSAYNKHRDKPIREQAENIIHLF |
| | | TLTNLGAPAAFKYFDTTIDRKRYTSTKEVLDATLIHQSITGLYETRIDLSQLGGDSGGS |
| | | SGGSSGSETPGTSESATPESSGGSSGGSSTLNIEDEYRLHETSKEPDVSLGSTWLSDFP |
| | | QAWAETGGMGLAVRQAPLIIPLKATSTPVSIKQYPMSQEARLGIKPHIQRLLDQGILVP |
| | | CQSPWNTPLLPVKKPGTNDYRPVQDLREVNKRVEDIHPTVPNPYNLLSGLPPSHQWYTV |
| | | LDLKDAFFCLRLHPTSQPLFAFEWRDPEMGISGQLTWTRLPQGFKNSPTLFNEALHRDL |
| | | ADFRIQHPDLILLQYVDDLLLAATSELDCQQGTRALLQTLGNLGYRASAKKAQICQKQV |
| | | KYLGYLLKEGQRWLTEARKETVMGQPTPKTPRQLREFLGKAGFCRLFIPGFAEMAAPLY |
| | | PLTKPGTLFNWGPDQQKAYQEIKQALLTAPALGLPDLTKPFELFVDEKQGYAKGVLTQK |
| | | LGPWRRPVAYLSKKLDPVAAGWPPCLRMVAAIAVLTKDAGKLTMGQPLVILAPHAVEAL |
| | | VKQPPDRWLSNARMTHYQALLLDTDRVQFGPVVALNPATLLPLPEEGLQHNCLDILAEA |
| | | HGTRPDLTDQPLPDADHTWYTDGSSLLQEGQRKAGAAVTTETEVIWAKALPAGTSAQRA |
| | | ELIALTQALKMAEGKKLNVYTDSRYAFATAHIHGEIYRRRGWLTSEGKEIKNKDEILAL |
| | | LKALFLPKRLSIIHCPGHQKGHSAEARGNRMADQAARKAAITETPDTSTLLIENSSPSG |
| | | GSKRTADGSEFEPKKKRKVGGSKDKKSDGKDSQKK* |
| 638 | PL1934_ | ATGcctgctgctaagagagtgaaactggatggcggcagcAAGGACAAGAAATCCGATGG |
| | DNA | CAAGGACAGCCAGAAAAAAGGCAGCAGAGCCCTGGTGGTGATCAGACTGAGCAGAGTGA |
| | | CCGACGCCACCACCAGCCCCGAGAGACAGCTGGAGAGCTGCCAGCAGCTGTGCGCCCAG |
| | | AGAGGCTGGGACGTGGTGGGCGTGGCCGAGGACCTGGACGTGAGCGGCGCCGTGGACCC |
| | | CTTCGACAGAAAGAGAAGACCCAACCTGGCCAGATGGCTGGCCTTCGAGGAGCAGCCCT |
| | | TCGACGTGATCGTGGCCTACAGAGTGGACAGACTGACCAGAAGCATCAGACACCTGCAG |
| | | CAGCTGGTGCACTGGGCCGAGGACCACAAGAAGCTGGTGGTGAGCGCCACCGAGGCCCA |
| | | CTTCGACACCACCACCCCCTTCGCCGCCGTGGTGATCGCCCTGATGGGCACCGTGGCCC |
| | | AGATGGAGCTGGAGGCCATCAAGGAGAGAAACAGAAGCGCCGCCCACTTCAACATCAGA |
| | | GCCGGCAAGTACAGAGGCAGCCTGCCCCCCTGGGGCTACCTGCCCACCAGAGTGGACGG |
| | | CGAGTGGAGACTGGTGCCCGACCCCGTGCAGAGAGAGAGAATCCTGGAGGTGTACCACA |
| | | GAGTGGTGGACAACCACGAGCCCCTGCACCTGGTGGCCCACGACCTGAACAGAAGAGGC |
| | | GTGCTGAGCCCCAAGGACTACTTCGCCCAGCTGCAGGGCAGAGAGCCCCAGGGCAGAGA |
| | | GTGGAGCGCCACCGCCCTGAAGAGAAGCATGATCAGCGAGGCCATGCTGGGCTACGCCA |
| | | CCCTGAACGGCAAGACCGTGAGAGACGACGACGGCGCCCCCCTGGTGAGAGCCGAGCCC |
| | | ATCCTGACCAGAGAGCAGCTGGAGGCCCTGAGAGCCGAGCTGGTGAAGACCAGCAGAGC |
| | | CAAGCCCGCCGTGAGCACCCCCAGCCTGCTGCTGAGAGTGCTGTTCTGCGCCGTGTGCG |
| | | GCGAGCCCGCCTACAAGTTCGCCGGCGGCGGCAGAAAGCACCCCAGATACAGATGCAGA |
| | | AGCATGGGCTTCCCCAAGCACTGCGGCAACGGCACCGTGGCCATGGCCGAGTGGGACGC |
| | | CTTCTGCGAGGAGCAGGTGCTGGACCTGCTGGGCGACGCCGAGAGACTGGAGAAGGTGT |
| | | GGGTGGCCGGCAGCGACAGCGCCGTGGAGCTGGCCGAGGTGAACGCCGAGCTGGTGGAC |
| | | CTGACCAGCCTGATCGGCAGCCCCGCCTACAGAGCCGGCAGCCCCCAGAGAGAGGCCCT |
| | | GGACGCCAGAATCGCCGCCCTGGCCGCCAGACAGGAGGAGCTGGAGGGCCTGGAGGCCA |
| | | GACCCAGCGGCTGGGAGTGGAGAGAGACCGGCCAGAGATTCGGCGACTGGTGGAGAGAG |
| | | CAGGACACCGCCGCCAAGAACACCTGGCTGAGAAGCATGAACGTGAGACTGACCTTCGA |
| | | CGTGAGAGGCGGCCTGACCAGAACCATCGACTTCGGCGACCTGCAGGAGTACGAGCAGC |
| | | ACCTGAGACTGGGCAGCGTGGTGGAGAGACTGCACACCGGCATGAGCGGCGGCAGCCCC |
| | | AAGAAGAAGAGAAAGGTGGGCAGCGGCGCCACCAACTTCAGCCTGCTGAAGCAGGCCGG |
| | | CGACGTGGAGGAGAACCCCGGCCCCAAGAGAACCGCCGACGGCAGCGAGTTCGAGAGCC |
| | | CCAAGAAGAAGAGAAAGGTGGACAAGAAGTACAGCATCGGCCTGGACATCGGCACCAAC |
| | | AGCGTGGGCTGGGCCGTGATCACCGACGAGTACAAGGTGCCCAGCAAGAAGTTCAAGGT |
| | | GCTGGGCAACACCGACAGACACAGCATCAAGAAGAACCTGATCGGCGCCCTGCTGTTCG |
| | | ACAGCGGCGAGACCGCCGAGGCCACCAGACTGAAGAGAACCGCCAGAAGAAGATACACC |
| | | AGAAGAAAGAACAGAATCTGCTACCTGCAGGAGATCTTCAGCAACGAGATGGCCAAGGT |
| | | GGACGACAGCTTCTTCCACAGACTGGAGGAGAGCTTCCTGGTGGAGGAGGACAAGAAGC |
| | | ACGAGAGACACCCCATCTTCGGCAACATCGTGGACGAGGTGGCCTACCACGAGAAGTAC |
| | | CCCACCATCTACCACCTGAGAAAGAAGCTGGTGGACAGCACCGACAAGGCCGACCTGAG |
| | | ACTGATCTACCTGGCCCTGGCCCACATGATCAAGTTCAGAGGCCACTTCCTGATCGAGG |
| | | GCGACCTGAACCCCGACAACAGCGACGTGGACAAGCTGTTCATCCAGCTGGTGCAGACC |
| | | TACAACCAGCTGTTCGAGGAGAACCCCATCAACGCCAGCGGCGTGGACGCCAAGGCCAT |
| | | CCTGAGCGCCAGACTGAGCAAGAGCAGAAGACTGGAGAACCTGATCGCCCAGCTGCCCG |
| | | GCGAGAAGAAGAACGGCCTGTTCGGCAACCTGATCGCCCTGAGCCTGGGCCTGACCCCC |
| | | AACTTCAAGAGCAACTTCGACCTGGCCGAGGACGCCAAGCTGCAGCTGAGCAAGGACAC |
| | | CTACGACGACGACCTGGACAACCTGCTGGCCCAGATCGGCGACCAGTACGCCGACCTGT |
| | | TCCTGGCCGCCAAGAACCTGAGCGACGCCATCCTGCTGAGCGACATCCTGAGAGTGAAC |
| | | ACCGAGATCACCAAGGCCCCCCTGAGCGCCAGCATGATCAAGAGATACGACGAGCACCA |
| | | CCAGGACCTGACCCTGCTGAAGGCCCTGGTGAGACAGCAGCTGCCCGAGAAGTACAAGG |
| | | AGATCTTCTTCGACCAGAGCAAGAACGGCTACGCCGGCTACATCGACGGCGGCGCCAGC |
| | | CAGGAGGAGTTCTACAAGTTCATCAAGCCCATCCTGGAGAAGATGGACGGCACCGAGGA |
| | | GCTGCTGGTGAAGCTGAACAGAGAGGACCTGCTGAGAAAGCAGAGAACCTTCGACAACG |
| | | GCAGCATCCCCCACCAGATCCACCTGGGCGAGCTGCACGCCATCCTGAGAAGACAGGAG |
| | | GACTTCTACCCCTTCCTGAAGGACAACAGAGAGAAGATCGAGAAGATCCTGACCTTCAG |
| | | AATCCCCTACTACGTGGGCCCCCTGGCCAGAGGCAACAGCAGATTCGCCTGGATGACCA |
| | | GAAAGAGCGAGGAGACCATCACCCCCTGGAACTTCGAGGAGGTGGTGGACAAGGGCGCC |
| | | AGCGCCCAGAGCTTCATCGAGAGAATGACCAACTTCGACAAGAACCTGCCCAACGAGAA |
| | | GGTGCTGCCCAAGCACAGCCTGCTGTACGAGTACTTCACCGTGTACAACGAGCTGACCA |
| | | AGGTGAAGTACGTGACCGAGGGCATGAGAAAGCCCGCCTTCCTGAGCGGCGAGCAGAAG |
| | | AAGGCCATCGTGGACCTGCTGTTCAAGACCAACAGAAAGGTGACCGTGAAGCAGCTGAA |
| | | GGAGGACTACTTCAAGAAGATCGAGTGCTTCGACAGCGTGGAGATCAGCGGCGTGGAGG |
| | | ACAGATTCAACGCCAGCCTGGGCACCTACCACGACCTGCTGAAGATCATCAAGGACAAG |
| | | GACTTCCTGGACAACGAGGAGAACGAGGACATCCTGGAGGACATCGTGCTGACCCTGAC |
| | | CCTGTTCGAGGACAGAGAGATGATCGAGGAGAGACTGAAGACCTACGCCCACCTGTTCG |
| | | ACGACAAGGTGATGAAGCAGCTGAAGAGAAGAAGATACACCGGCTGGGGCAGACTGAGC |
| | | AGAAAGCTGATCAACGGCATCAGAGACAAGCAGAGCGGCAAGACCATCCTGGACTTCCT |
| | | GAAGAGTGACGGCTTCGCCAACAGAAACTTCATGCAGCTGATCCACGACGACAGCCTGA |
| | | CCTTCAAGGAGGACATCCAGAAGGCCCAGGTGAGCGGCCAGGGCGACAGCCTGCACGAG |
| | | CACATCGCCAACCTGGCCGGCAGCCCCGCCATCAAGAAGGGCATCCTGCAGACCGTGAA |
| | | GGTGGTGGACGAGCTGGTGAAGGTGATGGGCAGACACAAGCCCGAGAACATCGTGATCG |
| | | AGATGGCCAGAGAGAACCAGACCACCCAGAAGGGCCAGAAGAACAGCAGAGAGAGAATG |
| | | AAGAGAATCGAGGAGGGCATCAAGGAGCTGGGCAGCCAGATCCTGAAGGAGCACCCCGT |
| | | GGAGAACACCCAGCTGCAGAACGAGAAGCTGTACCTGTACTACCTGCAGAACGGCAGAG |
| | | ACATGTACGTGGACCAGGAGCTGGACATCAACAGACTGAGCGACTACGACGTGGACGCC |
| | | ATCGTGCCCCAGAGCTTCCTGAAGGACGACAGCATCGACAACAAGGTGCTGACCAGAAG |
| | | CGACAAGAACAGAGGCAAGAGCGACAACGTGCCCAGCGAGGAGGTGGTGAAGAAGATGA |
| | | AGAACTACTGGAGACAGCTGCTGAACGCCAAGCTGATCACCCAGAGAAAGTTCGACAAC |
| | | CTGACCAAGGCCGAGAGAGGCGGCCTGAGCGAGCTGGACAAGGCCGGCTTCATCAAGAG |
| | | ACAGCTGGTGGAGACCAGACAGATCACCAAGCACGTGGCCCAGATCCTGGACAGCAGAA |
| | | TGAACACCAAGTACGACGAGAACGACAAGCTGATCAGAGAGGTGAAGGTGATCACCCTG |
| | | AAGAGTAAGCTGGTGAGCGACTTCAGAAAGGACTTCCAGTTCTACAAGGTGAGAGAGAT |
| | | CAACAACTACCACCACGCCCACGACGCCTACCTGAACGCCGTGGTGGGCACCGCCCTGA |
| | | TCAAGAAGTACCCCAAGCTGGAGAGCGAGTTCGTGTACGGCGACTACAAGGTGTACGAC |
| | | GTGAGAAAGATGATCGCCAAGAGCGAGCAGGAGATCGGCAAGGCCACCGCCAAGTACTT |
| | | CTTCTACAGCAACATCATGAACTTCTTCAAGACCGAGATCACCCTGGCCAACGGCGAGA |
| | | TCAGAAAGAGACCCCTGATCGAGACCAACGGCGAGACCGGCGAGATCGTGTGGGACAAG |
| | | GGCAGAGACTTCGCCACCGTGAGAAAGGTGCTGAGCATGCCCCAGGTGAACATCGTGAA |
| | | GAAGACCGAGGTGCAGACCGGCGGCTTCAGCAAGGAGAGCATCCTGCCCAAGAGAAACA |
| | | GCGACAAGCTGATCGCCAGAAAGAAGGACTGGGACCCCAAGAAGTACGGCGGCTTCGAC |
| | | AGCCCCACCGTGGCCTACAGCGTGCTGGTGGTGGCCAAGGTGGAGAAGGGCAAGAGCAA |
| | | GAAGCTGAAGAGTGTGAAGGAGCTGCTGGGCATCACCATCATGGAGAGAAGCAGCTTCG |
| | | AGAAGAACCCCATCGACTTCCTGGAGGCCAAGGGCTACAAGGAGGTGAAGAAGGACCTG |
| | | ATCATCAAGCTGCCCAAGTACAGCCTGTTCGAGCTGGAGAACGGCAGAAAGAGAATGCT |
| | | GGCCAGCGCCGGCGAGCTGCAGAAGGGCAACGAGCTGGCCCTGCCCAGCAAGTACGTGA |
| | | ACTTCCTGTACCTGGCCAGCCACTACGAGAAGCTGAAGGGCAGCCCCGAGGACAACGAG |
| | | CAGAAGCAGCTGTTCGTGGAGCAGCACAAGCACTACCTGGACGAGATCATCGAGCAGAT |
| | | CAGCGAGTTCAGCAAGAGAGTGATCCTGGCCGACGCCAACCTGGACAAGGTGCTGAGCG |
| | | CCTACAACAAGCACAGAGACAAGCCCATCAGAGAGCAGGCCGAGAACATCATCCACCTG |
| | | TTCACCCTGACCAACCTGGGCGCCCCCGCCGCCTTCAAGTACTTCGACACCACCATCGA |
| | | CAGAAAGAGATACACCAGCACCAAGGAGGTGCTGGACGCCACCCTGATCCACCAGAGCA |
| | | TCACCGGCCTGTACGAGACCAGAATCGACCTGAGCCAGCTGGGCGGCGACAGCGGCGGC |
| | | AGCAGCGGCGGCAGCAGCGGCAGCGAGACCCCCGGCACCAGCGAGAGCGCCACCCCCGA |
| | | GAGCAGCGGCGGCAGCAGCGGCGGCAGCAGCACCCTGAACATCGAGGACGAGTACAGAC |
| | | TGCACGAGACCAGCAAGGAGCCCGACGTGAGCCTGGGCAGCACCTGGCTGAGCGACTTC |
| | | CCCCAGGCCTGGGCCGAGACCGGCGGCATGGGCCTGGCCGTGAGACAGGCCCCCCTGAT |
| | | CATCCCCCTGAAGGCCACCAGCACCCCCGTGAGCATCAAGCAGTACCCCATGAGCCAGG |
| | | AGGCCAGACTGGGCATCAAGCCCCACATCCAGAGACTGCTGGACCAGGGCATCCTGGTG |
| | | CCCTGCCAGAGCCCCTGGAACACCCCCCTGCTGCCCGTGAAGAAGCCCGGCACCAACGA |
| | | CTACAGACCCGTGCAGGACCTGAGAGAGGTGAACAAGAGAGTGGAGGACATCCACCCCA |
| | | CCGTGCCCAACCCCTACAACCTGCTGAGCGGCCTGCCCCCCAGCCACCAGTGGTACACC |
| | | GTGCTGGACCTGAAGGACGCCTTCTTCTGCCTGAGACTGCACCCCACCAGCCAGCCCCT |
| | | GTTCGCCTTCGAGTGGAGAGACCCCGAGATGGGCATCAGCGGCCAGCTGACCTGGACCA |
| | | GACTGCCCCAGGGCTTCAAGAACAGCCCCACCCTGTTCAACGAGGCCCTGCACAGAGAC |
| | | CTGGCCGACTTCAGAATCCAGCACCCCGACCTGATCCTGCTGCAGTACGTGGACGACCT |
| | | GCTGCTGGCCGCCACCAGCGAGCTGGACTGCCAGCAGGGCACCAGAGCCCTGCTGCAGA |
| | | CCCTGGGCAACCTGGGCTACAGAGCCAGCGCCAAGAAGGCCCAGATCTGCCAGAAGCAG |
| | | GTGAAGTACCTGGGCTACCTGCTGAAGGAGGGCCAGAGATGGCTGACCGAGGCCAGAAA |
| | | GGAGACCGTGATGGGCCAGCCCACCCCCAAGACCCCCAGACAGCTGAGAGAGTTCCTGG |
| | | GCAAGGCCGGCTTCTGCAGACTGTTCATCCCCGGCTTCGCCGAGATGGCCGCCCCCCTG |
| | | TACCCCCTGACCAAGCCCGGCACCCTGTTCAACTGGGGCCCCGACCAGCAGAAGGCCTA |
| | | CCAGGAGATCAAGCAGGCCCTGCTGACCGCCCCCGCCCTGGGCCTGCCCGACCTGACCA |
| | | AGCCCTTCGAGCTGTTCGTGGACGAGAAGCAGGGCTACGCCAAGGGCGTGCTGACCCAG |
| | | AAGCTGGGCCCCTGGAGAAGACCCGTGGCCTACCTGAGCAAGAAGCTGGACCCCGTGGC |
| | | CGCCGGCTGGCCCCCCTGCCTGAGAATGGTGGCCGCCATCGCCGTGCTGACCAAGGACG |
| | | CCGGCAAGCTGACCATGGGCCAGCCCCTGGTGATCCTGGCCCCCCACGCCGTGGAGGCC |
| | | CTGGTGAAGCAGCCCCCCGACAGATGGCTGAGCAACGCCAGAATGACCCACTACCAGGC |
| | | CCTGCTGCTGGACACCGACAGAGTGCAGTTCGGCCCCGTGGTGGCCCTGAACCCCGCCA |
| | | CCCTGCTGCCCCTGCCCGAGGAGGGCCTGCAGCACAACTGCCTGGACATCCTGGCCGAG |
| | | GCCCACGGCACCAGACCCGACCTGACCGACCAGCCCCTGCCCGACGCCGACCACACCTG |
| | | GTACACCGACGGCAGCAGCCTGCTGCAGGAGGGCCAGAGAAAGGCCGGCGCCGCCGTGA |
| | | CCACCGAGACCGAGGTGATCTGGGCCAAGGCCCTGCCCGCCGGCACCAGCGCCCAGAGA |
| | | GCCGAGCTGATCGCCCTGACCCAGGCCCTGAAGATGGCCGAGGGCAAGAAGCTGAACGT |
| | | GTACACCGACAGCAGATACGCCTTCGCCACCGCCCACATCCACGGCGAGATCTACAGAA |
| | | GAAGAGGCTGGCTGACCAGCGAGGGCAAGGAGATCAAGAACAAGGACGAGATCCTGGCC |
| | | CTGCTGAAGGCCCTGTTCCTGCCCAAGAGACTGAGCATCATCCACTGCCCCGGCCACCA |
| | | GAAGGGCCACAGCGCCGAGGCCAGAGGCAACAGAATGGCCGACCAGGCCGCCAGAAAGG |
| | | CCGCCATCACCGAGACCCCCGACACCAGCACCCTGCTGATCGAGAACAGCAGCCCCAGC |
| | | GGCGGCAGCAAGAGAACCGCCGACGGCAGCGAGTTCGAGCCCAAGAAGAAGAGAAAGGT |
| | | GggcggcagcAAGGACAAAAAGAGCGACGGCAAGGACTCGCAAAAAAAATGA |
| 639 | PL1922 | MKRTADGSEFESPKKKRKVDKKYSIGLDIGTNSVGWAVITDEYKVPSKKFKVLGNTDRH |
| | _AA | SIKKNLIGALLFDSGETAEATRLKRTARRRYTRRKNRICYLQEIFSNEMAKVDDSFFHR |
| | | LEESFLVEEDKKHERHPIFGNIVDEVAYHEKYPTIYHLRKKLVDSTDKADLRLIYLALA |
| | | HMIKFRGHFLIEGDLNPDNSDVDKLFIQLVQTYNQLFEENPINASGVDAKAILSARLSK |
| | | SRRLENLIAQLPGEKKNGLFGNLIALSLGLTPNFKSNFDLAEDAKLQLSKDTYDDDLDN |
| | | LLAQIGDQYADLFLAAKNLSDAILLSDILRVNTEITKAPLSASMIKRYDEHHQDLTLLK |
| | | ALVRQQLPEKYKEIFFDQSKNGYAGYIDGGASQEEFYKFIKPILEKMDGTEELLVKLNR |
| | | EDLLRKQRTFDNGSIPHQIHLGELHAILRRQEDFYPFLKDNREKIEKILTFRIPYYVGP |
| | | LARGNSRFAWMTRKSEETITPWNFEEVVDKGASAQSFIERMTNFDKNLPNEKVLPKHSL |
| | | LYEYFTVYNELTKVKYVTEGMRKPAFLSGEQKKAIVDLLFKTNRKVTVKQLKEDYFKKI |
| | | ECFDSVEISGVEDRFNASLGTYHDLLKIIKDKDFLDNEENEDILEDIVLTLTLFEDREM |
| | | IEERLKTYAHLFDDKVMKQLKRRRYTGWGRLSRKLINGIRDKQSGKTILDFLKSDGFAN |
| | | RNFMQLIHDDSLTFKEDIQKAQVSGQGDSLHEHIANLAGSPAIKKGILQTVKVVDELVK |
| | | VMGRHKPENIVIEMARENQTTQKGQKNSRERMKRIEEGIKELGSQILKEHPVENTQLQN |
| | | EKLYLYYLQNGRDMYVDQELDINRLSDYDVDAIVPQSFLKDDSIDNKVLTRSDKNRGKS |
| | | DNVPSEEVVKKMKNYWRQLLNAKLITQRKFDNLTKAERGGLSELDKAGFIKRQLVETRQ |
| | | ITKHVAQILDSRMNTKYDENDKLIREVKVITLKSKLVSDFRKDFQFYKVREINNYHHAH |
| | | DAYLNAVVGTALIKKYPKLESEFVYGDYKVYDVRKMIAKSEQEIGKATAKYFFYSNIMN |
| | | FFKTEITLANGEIRKRPLIETNGETGEIVWDKGRDFATVRKVLSMPQVNIVKKTEVQTG |
| | | GFSKESILPKRNSDKLIARKKDWDPKKYGGFDSPTVAYSVLVVAKVEKGKSKKLKSVKE |
| | | LLGITIMERSSFEKNPIDFLEAKGYKEVKKDLIIKLPKYSLFELENGRKRMLASAGELQ |
| | | KGNELALPSKYVNFLYLASHYEKLKGSPEDNEQKQLFVEQHKHYLDEIIEQISEFSKRV |
| | | ILADANLDKVLSAYNKHRDKPIREQAENIIHLFTLTNLGAPAAFKYFDTTIDRKRYTST |
| | | KEVLDATLIHQSITGLYETRIDLSQLGGDSGGSSGGSSGSETPGTSESATPESSGGSSG |
| | | GSSTLNIEDEYRLHETSKEPDVSLGSTWLSDFPQAWAETGGMGLAVRQAPLIIPLKATS |
| | | TPVSIKQYPMSQEARLGIKPHIQRLLDQGILVPCQSPWNTPLLPVKKPGTNDYRPVQDL |
| | | REVNKRVEDIHPTVPNPYNLLSGLPPSHQWYTVLDLKDAFFCLRLHPTSQPLFAFEWRD |
| | | PEMGISGQLTWTRLPQGFKNSPTLFNEALHRDLADFRIQHPDLILLQYVDDLLLAATSE |
| | | LDCQQGTRALLQTLGNLGYRASAKKAQICQKQVKYLGYLLKEGQRWLTEARKETVMGQP |
| | | TPKTPRQLREFLGKAGFCRLFIPGFAEMAAPLYPLTKPGTLFNWGPDQQKAYQEIKQAL |
| | | LTAPALGLPDLTKPFELFVDEKQGYAKGVLTQKLGPWRRPVAYLSKKLDPVAAGWPPCL |
| | | RMVAAIAVLTKDAGKLTMGQPLVILAPHAVEALVKQPPDRWLSNARMTHYQALLLDTDR |
| | | VQFGPVVALNPATLLPLPEEGLQHNCLDILAEAHGTRPDLTDQPLPDADHTWYTDGSSL |
| | | LQEGQRKAGAAVTTETEVIWAKALPAGTSAQRAELIALTQALKMAEGKKLNVYTDSRYA |
| | | FATAHIHGEIYRRRGWLTSEGKEIKNKDEILALLKALFLPKRLSIIHCPGHQKGHSAEA |
| | | RGNRMADQAARKAAITETPDTSTLLIENSSPSGGSKRTADGSEFEPKKKRKVGGSVSGW |
| | | RLFKKISGSGKDKKSDGKDSQKK* |
| 640 | PL1922_ | ATGAAGAGAACCGCCGACGGCAGCGAGTTCGAGAGCCCCAAGAAGAAGAGAAAGGTGGA |
| | DNA | CAAGAAGTACAGCATCGGCCTGGACATCGGCACCAACAGCGTGGGCTGGGCCGTGATCA |
| | | CCGACGAGTACAAGGTGCCCAGCAAGAAGTTCAAGGTGCTGGGCAACACCGACAGACAC |
| | | AGCATCAAGAAGAACCTGATCGGCGCCCTGCTGTTCGACAGCGGCGAGACCGCCGAGGC |
| | | CACCAGACTGAAGAGAACCGCCAGAAGAAGATACACCAGAAGAAAGAACAGAATCTGCT |
| | | ACCTGCAGGAGATCTTCAGCAACGAGATGGCCAAGGTGGACGACAGCTTCTTCCACAGA |
| | | CTGGAGGAGAGCTTCCTGGTGGAGGAGGACAAGAAGCACGAGAGACACCCCATCTTCGG |
| | | CAACATCGTGGACGAGGTGGCCTACCACGAGAAGTACCCCACCATCTACCACCTGAGAA |
| | | AGAAGCTGGTGGACAGCACCGACAAGGCCGACCTGAGACTGATCTACCTGGCCCTGGCC |
| | | CACATGATCAAGTTCAGAGGCCACTTCCTGATCGAGGGCGACCTGAACCCCGACAACAG |
| | | CGACGTGGACAAGCTGTTCATCCAGCTGGTGCAGACCTACAACCAGCTGTTCGAGGAGA |
| | | ACCCCATCAACGCCAGCGGCGTGGACGCCAAGGCCATCCTGAGCGCCAGACTGAGCAAG |
| | | AGCAGAAGACTGGAGAACCTGATCGCCCAGCTGCCCGGCGAGAAGAAGAACGGCCTGTT |
| | | CGGCAACCTGATCGCCCTGAGCCTGGGCCTGACCCCCAACTTCAAGAGCAACTTCGACC |
| | | TGGCCGAGGACGCCAAGCTGCAGCTGAGCAAGGACACCTACGACGACGACCTGGACAAC |
| | | CTGCTGGCCCAGATCGGCGACCAGTACGCCGACCTGTTCCTGGCCGCCAAGAACCTGAG |
| | | CGACGCCATCCTGCTGAGCGACATCCTGAGAGTGAACACCGAGATCACCAAGGCCCCCC |
| | | TGAGCGCCAGCATGATCAAGAGATACGACGAGCACCACCAGGACCTGACCCTGCTGAAG |
| | | GCCCTGGTGAGACAGCAGCTGCCCGAGAAGTACAAGGAGATCTTCTTCGACCAGAGCAA |
| | | GAACGGCTACGCCGGCTACATCGACGGCGGCGCCAGCCAGGAGGAGTTCTACAAGTTCA |
| | | TCAAGCCCATCCTGGAGAAGATGGACGGCACCGAGGAGCTGCTGGTGAAGCTGAACAGA |
| | | GAGGACCTGCTGAGAAAGCAGAGAACCTTCGACAACGGCAGCATCCCCCACCAGATCCA |
| | | CCTGGGCGAGCTGCACGCCATCCTGAGAAGACAGGAGGACTTCTACCCCTTCCTGAAGG |
| | | ACAACAGAGAGAAGATCGAGAAGATCCTGACCTTCAGAATCCCCTACTACGTGGGCCCC |
| | | CTGGCCAGAGGCAACAGCAGATTCGCCTGGATGACCAGAAAGAGCGAGGAGACCATCAC |
| | | CCCCTGGAACTTCGAGGAGGTGGTGGACAAGGGCGCCAGCGCCCAGAGCTTCATCGAGA |
| | | GAATGACCAACTTCGACAAGAACCTGCCCAACGAGAAGGTGCTGCCCAAGCACAGCCTG |
| | | CTGTACGAGTACTTCACCGTGTACAACGAGCTGACCAAGGTGAAGTACGTGACCGAGGG |
| | | CATGAGAAAGCCCGCCTTCCTGAGCGGCGAGCAGAAGAAGGCCATCGTGGACCTGCTGT |
| | | TCAAGACCAACAGAAAGGTGACCGTGAAGCAGCTGAAGGAGGACTACTTCAAGAAGATC |
| | | GAGTGCTTCGACAGCGTGGAGATCAGCGGCGTGGAGGACAGATTCAACGCCAGCCTGGG |
| | | CACCTACCACGACCTGCTGAAGATCATCAAGGACAAGGACTTCCTGGACAACGAGGAGA |
| | | ACGAGGACATCCTGGAGGACATCGTGCTGACCCTGACCCTGTTCGAGGACAGAGAGATG |
| | | ATCGAGGAGAGACTGAAGACCTACGCCCACCTGTTCGACGACAAGGTGATGAAGCAGCT |
| | | GAAGAGAAGAAGATACACCGGCTGGGGCAGACTGAGCAGAAAGCTGATCAACGGCATCA |
| | | GAGACAAGCAGAGCGGCAAGACCATCCTGGACTTCCTGAAGAGTGACGGCTTCGCCAAC |
| | | AGAAACTTCATGCAGCTGATCCACGACGACAGCCTGACCTTCAAGGAGGACATCCAGAA |
| | | GGCCCAGGTGAGCGGCCAGGGCGACAGCCTGCACGAGCACATCGCCAACCTGGCCGGCA |
| | | GCCCCGCCATCAAGAAGGGCATCCTGCAGACCGTGAAGGTGGTGGACGAGCTGGTGAAG |
| | | GTGATGGGCAGACACAAGCCCGAGAACATCGTGATCGAGATGGCCAGAGAGAACCAGAC |
| | | CACCCAGAAGGGCCAGAAGAACAGCAGAGAGAGAATGAAGAGAATCGAGGAGGGCATCA |
| | | AGGAGCTGGGCAGCCAGATCCTGAAGGAGCACCCCGTGGAGAACACCCAGCTGCAGAAC |
| | | GAGAAGCTGTACCTGTACTACCTGCAGAACGGCAGAGACATGTACGTGGACCAGGAGCT |
| | | GGACATCAACAGACTGAGCGACTACGACGTGGACGCCATCGTGCCCCAGAGCTTCCTGA |
| | | AGGACGACAGCATCGACAACAAGGTGCTGACCAGAAGCGACAAGAACAGAGGCAAGAGC |
| | | GACAACGTGCCCAGCGAGGAGGTGGTGAAGAAGATGAAGAACTACTGGAGACAGCTGCT |
| | | GAACGCCAAGCTGATCACCCAGAGAAAGTTCGACAACCTGACCAAGGCCGAGAGAGGCG |
| | | GCCTGAGCGAGCTGGACAAGGCCGGCTTCATCAAGAGACAGCTGGTGGAGACCAGACAG |
| | | ATCACCAAGCACGTGGCCCAGATCCTGGACAGCAGAATGAACACCAAGTACGACGAGAA |
| | | CGACAAGCTGATCAGAGAGGTGAAGGTGATCACCCTGAAGAGTAAGCTGGTGAGCGACT |
| | | TCAGAAAGGACTTCCAGTTCTACAAGGTGAGAGAGATCAACAACTACCACCACGCCCAC |
| | | GACGCCTACCTGAACGCCGTGGTGGGCACCGCCCTGATCAAGAAGTACCCCAAGCTGGA |
| | | GAGCGAGTTCGTGTACGGCGACTACAAGGTGTACGACGTGAGAAAGATGATCGCCAAGA |
| | | GCGAGCAGGAGATCGGCAAGGCCACCGCCAAGTACTTCTTCTACAGCAACATCATGAAC |
| | | TTCTTCAAGACCGAGATCACCCTGGCCAACGGCGAGATCAGAAAGAGACCCCTGATCGA |
| | | GACCAACGGCGAGACCGGCGAGATCGTGTGGGACAAGGGCAGAGACTTCGCCACCGTGA |
| | | GAAAGGTGCTGAGCATGCCCCAGGTGAACATCGTGAAGAAGACCGAGGTGCAGACCGGC |
| | | GGCTTCAGCAAGGAGAGCATCCTGCCCAAGAGAAACAGCGACAAGCTGATCGCCAGAAA |
| | | GAAGGACTGGGACCCCAAGAAGTACGGCGGCTTCGACAGCCCCACCGTGGCCTACAGCG |
| | | TGCTGGTGGTGGCCAAGGTGGAGAAGGGCAAGAGCAAGAAGCTGAAGAGTGTGAAGGAG |
| | | CTGCTGGGCATCACCATCATGGAGAGAAGCAGCTTCGAGAAGAACCCCATCGACTTCCT |
| | | GGAGGCCAAGGGCTACAAGGAGGTGAAGAAGGACCTGATCATCAAGCTGCCCAAGTACA |
| | | GCCTGTTCGAGCTGGAGAACGGCAGAAAGAGAATGCTGGCCAGCGCCGGCGAGCTGCAG |
| | | AAGGGCAACGAGCTGGCCCTGCCCAGCAAGTACGTGAACTTCCTGTACCTGGCCAGCCA |
| | | CTACGAGAAGCTGAAGGGCAGCCCCGAGGACAACGAGCAGAAGCAGCTGTTCGTGGAGC |
| | | AGCACAAGCACTACCTGGACGAGATCATCGAGCAGATCAGCGAGTTCAGCAAGAGAGTG |
| | | ATCCTGGCCGACGCCAACCTGGACAAGGTGCTGAGCGCCTACAACAAGCACAGAGACAA |
| | | GCCCATCAGAGAGCAGGCCGAGAACATCATCCACCTGTTCACCCTGACCAACCTGGGCG |
| | | CCCCCGCCGCCTTCAAGTACTTCGACACCACCATCGACAGAAAGAGATACACCAGCACC |
| | | AAGGAGGTGCTGGACGCCACCCTGATCCACCAGAGCATCACCGGCCTGTACGAGACCAG |
| | | AATCGACCTGAGCCAGCTGGGCGGCGACAGCGGCGGCAGCAGCGGCGGCAGCAGCGGCA |
| | | GCGAGACCCCCGGCACCAGCGAGAGCGCCACCCCCGAGAGCAGCGGCGGCAGCAGCGGC |
| | | GGCAGCAGCACCCTGAACATCGAGGACGAGTACAGACTGCACGAGACCAGCAAGGAGCC |
| | | CGACGTGAGCCTGGGCAGCACCTGGCTGAGCGACTTCCCCCAGGCCTGGGCCGAGACCG |
| | | GCGGCATGGGCCTGGCCGTGAGACAGGCCCCCCTGATCATCCCCCTGAAGGCCACCAGC |
| | | ACCCCCGTGAGCATCAAGCAGTACCCCATGAGCCAGGAGGCCAGACTGGGCATCAAGCC |
| | | CCACATCCAGAGACTGCTGGACCAGGGCATCCTGGTGCCCTGCCAGAGCCCCTGGAACA |
| | | CCCCCCTGCTGCCCGTGAAGAAGCCCGGCACCAACGACTACAGACCCGTGCAGGACCTG |
| | | AGAGAGGTGAACAAGAGAGTGGAGGACATCCACCCCACCGTGCCCAACCCCTACAACCT |
| | | GCTGAGCGGCCTGCCCCCCAGCCACCAGTGGTACACCGTGCTGGACCTGAAGGACGCCT |
| | | TCTTCTGCCTGAGACTGCACCCCACCAGCCAGCCCCTGTTCGCCTTCGAGTGGAGAGAC |
| | | CCCGAGATGGGCATCAGCGGCCAGCTGACCTGGACCAGACTGCCCCAGGGCTTCAAGAA |
| | | CAGCCCCACCCTGTTCAACGAGGCCCTGCACAGAGACCTGGCCGACTTCAGAATCCAGC |
| | | ACCCCGACCTGATCCTGCTGCAGTACGTGGACGACCTGCTGCTGGCCGCCACCAGCGAG |
| | | CTGGACTGCCAGCAGGGCACCAGAGCCCTGCTGCAGACCCTGGGCAACCTGGGCTACAG |
| | | AGCCAGCGCCAAGAAGGCCCAGATCTGCCAGAAGCAGGTGAAGTACCTGGGCTACCTGC |
| | | TGAAGGAGGGCCAGAGATGGCTGACCGAGGCCAGAAAGGAGACCGTGATGGGCCAGCCC |
| | | ACCCCCAAGACCCCCAGACAGCTGAGAGAGTTCCTGGGCAAGGCCGGCTTCTGCAGACT |
| | | GTTCATCCCCGGCTTCGCCGAGATGGCCGCCCCCCTGTACCCCCTGACCAAGCCCGGCA |
| | | CCCTGTTCAACTGGGGCCCCGACCAGCAGAAGGCCTACCAGGAGATCAAGCAGGCCCTG |
| | | CTGACCGCCCCCGCCCTGGGCCTGCCCGACCTGACCAAGCCCTTCGAGCTGTTCGTGGA |
| | | CGAGAAGCAGGGCTACGCCAAGGGCGTGCTGACCCAGAAGCTGGGCCCCTGGAGAAGAC |
| | | CCGTGGCCTACCTGAGCAAGAAGCTGGACCCCGTGGCCGCCGGCTGGCCCCCCTGCCTG |
| | | AGAATGGTGGCCGCCATCGCCGTGCTGACCAAGGACGCCGGCAAGCTGACCATGGGCCA |
| | | GCCCCTGGTGATCCTGGCCCCCCACGCCGTGGAGGCCCTGGTGAAGCAGCCCCCCGACA |
| | | GATGGCTGAGCAACGCCAGAATGACCCACTACCAGGCCCTGCTGCTGGACACCGACAGA |
| | | GTGCAGTTCGGCCCCGTGGTGGCCCTGAACCCCGCCACCCTGCTGCCCCTGCCCGAGGA |
| | | GGGCCTGCAGCACAACTGCCTGGACATCCTGGCCGAGGCCCACGGCACCAGACCCGACC |
| | | TGACCGACCAGCCCCTGCCCGACGCCGACCACACCTGGTACACCGACGGCAGCAGCCTG |
| | | CTGCAGGAGGGCCAGAGAAAGGCCGGCGCCGCCGTGACCACCGAGACCGAGGTGATCTG |
| | | GGCCAAGGCCCTGCCCGCCGGCACCAGCGCCCAGAGAGCCGAGCTGATCGCCCTGACCC |
| | | AGGCCCTGAAGATGGCCGAGGGCAAGAAGCTGAACGTGTACACCGACAGCAGATACGCC |
| | | TTCGCCACCGCCCACATCCACGGCGAGATCTACAGAAGAAGAGGCTGGCTGACCAGCGA |
| | | GGGCAAGGAGATCAAGAACAAGGACGAGATCCTGGCCCTGCTGAAGGCCCTGTTCCTGC |
| | | CCAAGAGACTGAGCATCATCCACTGCCCCGGCCACCAGAAGGGCCACAGCGCCGAGGCC |
| | | AGAGGCAACAGAATGGCCGACCAGGCCGCCAGAAAGGCCGCCATCACCGAGACCCCCGA |
| | | CACCAGCACCCTGCTGATCGAGAACAGCAGCCCCAGCGGCGGCAGCAAGAGAACCGCCG |
| | | ACGGCAGCGAGTTCGAGCCCAAGAAGAAGAGAAAGGTGGGCGGCAGCGTGAGCGGCTGG |
| | | AGACTGTTCAAGAAGATCAGCGGCAGCGGCAAGGACAAGAAATCCGATGGCAAGGACAG |
| | | CCAGAAAAAATGA |
| 641 | PL1923 | MKRTADGSEFESPKKKRKVDKKYSIGLDIGTNSVGWAVITDEYKVPSKKFKVLGNTDRH |
| | _AA | SIKKNLIGALLFDSGETAEATRLKRTARRRYTRRKNRICYLQEIFSNEMAKVDDSFFHR |
| | | LEESFLVEEDKKHERHPIFGNIVDEVAYHEKYPTIYHLRKKLVDSTDKADLRLIYLALA |
| | | HMIKFRGHFLIEGDLNPDNSDVDKLFIQLVQTYNQLFEENPINASGVDAKAILSARLSK |
| | | SRRLENLIAQLPGEKKNGLFGNLIALSLGLTPNFKSNFDLAEDAKLQLSKDTYDDDLDN |
| | | LLAQIGDQYADLFLAAKNLSDAILLSDILRVNTEITKAPLSASMIKRYDEHHQDLTLLK |
| | | ALVRQQLPEKYKEIFFDQSKNGYAGYIDGGASQEEFYKFIKPILEKMDGTEELLVKLNR |
| | | EDLLRKQRTFDNGSIPHQIHLGELHAILRRQEDFYPFLKDNREKIEKILTFRIPYYVGP |
| | | LARGNSRFAWMTRKSEETITPWNFEEVVDKGASAQSFIERMTNFDKNLPNEKVLPKHSL |
| | | LYEYFTVYNELTKVKYVTEGMRKPAFLSGEQKKAIVDLLFKTNRKVTVKQLKEDYFKKI |
| | | ECFDSVEISGVEDRFNASLGTYHDLLKIIKDKDFLDNEENEDILEDIVLTLTLFEDREM |
| | | IEERLKTYAHLFDDKVMKQLKRRRYTGWGRLSRKLINGIRDKQSGKTILDFLKSDGFAN |
| | | RNFMQLIHDDSLTFKEDIQKAQVSGQGDSLHEHIANLAGSPAIKKGILQTVKVVDELVK |
| | | VMGRHKPENIVIEMARENQTTQKGQKNSRERMKRIEEGIKELGSQILKEHPVENTQLQN |
| | | EKLYLYYLQNGRDMYVDQELDINRLSDYDVDAIVPQSFLKDDSIDNKVLTRSDKNRGKS |
| | | DNVPSEEVVKKMKNYWRQLLNAKLITQRKFDNLTKAERGGLSELDKAGFIKRQLVETRQ |
| | | ITKHVAQILDSRMNTKYDENDKLIREVKVITLKSKLVSDFRKDFQFYKVREINNYHHAH |
| | | DAYLNAVVGTALIKKYPKLESEFVYGDYKVYDVRKMIAKSEQEIGKATAKYFFYSNIMN |
| | | FFKTEITLANGEIRKRPLIETNGETGEIVWDKGRDFATVRKVLSMPQVNIVKKTEVQTG |
| | | GFSKESILPKRNSDKLIARKKDWDPKKYGGFDSPTVAYSVLWVAKVEKGKSKKLKSVKE |
| | | LLGITIMERSSFEKNPIDFLEAKGYKEVKKDLIIKLPKYSLFELENGRKRMLASAGELQ |
| | | KGNELALPSKYVNFLYLASHYEKLKGSPEDNEQKQLFVEQHKHYLDEIIEQISEFSKRV |
| | | ILADANLDKVLSAYNKHRDKPIREQAENIIHLFTLTNLGAPAAFKYFDTTIDRKRYTST |
| | | KEVLDATLIHQSITGLYETRIDLSQLGGDSGGSSGGSSGSETPGTSESATPESSGGSSG |
| | | GSSTLNIEDEYRLHETSKEPDVSLGSTWLSDFPQAWAETGGMGLAVRQAPLIIPLKATS |
| | | TPVSIKQYPMSQEARLGIKPHIQRLLDQGILVPCQSPWNTPLLPVKKPGTNDYRPVQDL |
| | | REVNKRVEDIHPTVPNPYNLLSGLPPSHQWYTVLDLKDAFFCLRLHPTSQPLFAFEWRD |
| | | PEMGISGQLTWTRLPQGFKNSPTLFNEALHRDLADFRIQHPDLILLQYVDDLLLAATSE |
| | | LDCQQGTRALLQTLGNLGYRASAKKAQICQKQVKYLGYLLKEGQRWLTEARKETVMGQP |
| | | TPKTPRQLREFLGKAGFCRLFIPGFAEMAAPLYPLTKPGTLFNWGPDQQKAYQEIKQAL |
| | | LTAPALGLPDLTKPFELFVDEKQGYAKGVLTQKLGPWRRPVAYLSKKLDPVAAGWPPCL |
| | | RMVAAIAVLTKDAGKLTMGQPLVILAPHAVEALVKQPPDRWLSNARMTHYQALLLDTDR |
| | | VQFGPVVALNPATLLPLPEEGLQHNCLDILAEAHGTRPDLTDQPLPDADHTWYTDGSSL |
| | | LQEGQRKAGAAVTTETEVIWAKALPAGTSAQRAELIALTQALKMAEGKKLNVYTDSRYA |
| | | FATAHIHGEIYRRRGWLTSEGKEIKNKDEILALLKALFLPKRLSIIHCPGHQKGHSAEA |
| | | RGNRMADQAARKAAITETPDTSTLLIENSSPSGGSKRTADGSEFEPKKKRKVGGSVSGW |
| | | RLFKKISGSGKDKKSDGKDSQKK* |
| 642 | PL1923_ | ATGAAGAGAACCGCCGACGGCAGCGAGTTCGAGAGCCCCAAGAAGAAGAGAAAGGTGGA |
| | DNA | CAAGAAGTACAGCATCGGCCTGGACATCGGCACCAACAGCGTGGGCTGGGCCGTGATCA |
| | | CCGACGAGTACAAGGTGCCCAGCAAGAAGTTCAAGGTGCTGGGCAACACCGACAGACAC |
| | | AGCATCAAGAAGAACCTGATCGGCGCCCTGCTGTTCGACAGCGGCGAGACCGCCGAGGC |
| | | CACCAGACTGAAGAGAACCGCCAGAAGAAGATACACCAGAAGAAAGAACAGAATCTGCT |
| | | ACCTGCAGGAGATCTTCAGCAACGAGATGGCCAAGGTGGACGACAGCTTCTTCCACAGA |
| | | CTGGAGGAGAGCTTCCTGGTGGAGGAGGACAAGAAGCACGAGAGACACCCCATCTTCGG |
| | | CAACATCGTGGACGAGGTGGCCTACCACGAGAAGTACCCCACCATCTACCACCTGAGAA |
| | | AGAAGCTGGTGGACAGCACCGACAAGGCCGACCTGAGACTGATCTACCTGGCCCTGGCC |
| | | CACATGATCAAGTTCAGAGGCCACTTCCTGATCGAGGGCGACCTGAACCCCGACAACAG |
| | | CGACGTGGACAAGCTGTTCATCCAGCTGGTGCAGACCTACAACCAGCTGTTCGAGGAGA |
| | | ACCCCATCAACGCCAGCGGCGTGGACGCCAAGGCCATCCTGAGCGCCAGACTGAGCAAG |
| | | AGCAGAAGACTGGAGAACCTGATCGCCCAGCTGCCCGGCGAGAAGAAGAACGGCCTGTT |
| | | CGGCAACCTGATCGCCCTGAGCCTGGGCCTGACCCCCAACTTCAAGAGCAACTTCGACC |
| | | TGGCCGAGGACGCCAAGCTGCAGCTGAGCAAGGACACCTACGACGACGACCTGGACAAC |
| | | CTGCTGGCCCAGATCGGCGACCAGTACGCCGACCTGTTCCTGGCCGCCAAGAACCTGAG |
| | | CGACGCCATCCTGCTGAGCGACATCCTGAGAGTGAACACCGAGATCACCAAGGCCCCCC |
| | | TGAGCGCCAGCATGATCAAGAGATACGACGAGCACCACCAGGACCTGACCCTGCTGAAG |
| | | GCCCTGGTGAGACAGCAGCTGCCCGAGAAGTACAAGGAGATCTTCTTCGACCAGAGCAA |
| | | GAACGGCTACGCCGGCTACATCGACGGCGGCGCCAGCCAGGAGGAGTTCTACAAGTTCA |
| | | TCAAGCCCATCCTGGAGAAGATGGACGGCACCGAGGAGCTGCTGGTGAAGCTGAACAGA |
| | | GAGGACCTGCTGAGAAAGCAGAGAACCTTCGACAACGGCAGCATCCCCCACCAGATCCA |
| | | CCTGGGCGAGCTGCACGCCATCCTGAGAAGACAGGAGGACTTCTACCCCTTCCTGAAGG |
| | | ACAACAGAGAGAAGATCGAGAAGATCCTGACCTTCAGAATCCCCTACTACGTGGGCCCC |
| | | CTGGCCAGAGGCAACAGCAGATTCGCCTGGATGACCAGAAAGAGCGAGGAGACCATCAC |
| | | CCCCTGGAACTTCGAGGAGGTGGTGGACAAGGGCGCCAGCGCCCAGAGCTTCATCGAGA |
| | | GAATGACCAACTTCGACAAGAACCTGCCCAACGAGAAGGTGCTGCCCAAGCACAGCCTG |
| | | CTGTACGAGTACTTCACCGTGTACAACGAGCTGACCAAGGTGAAGTACGTGACCGAGGG |
| | | CATGAGAAAGCCCGCCTTCCTGAGCGGCGAGCAGAAGAAGGCCATCGTGGACCTGCTGT |
| | | TCAAGACCAACAGAAAGGTGACCGTGAAGCAGCTGAAGGAGGACTACTTCAAGAAGATC |
| | | GAGTGCTTCGACAGCGTGGAGATCAGCGGCGTGGAGGACAGATTCAACGCCAGCCTGGG |
| | | CACCTACCACGACCTGCTGAAGATCATCAAGGACAAGGACTTCCTGGACAACGAGGAGA |
| | | ACGAGGACATCCTGGAGGACATCGTGCTGACCCTGACCCTGTTCGAGGACAGAGAGATG |
| | | ATCGAGGAGAGACTGAAGACCTACGCCCACCTGTTCGACGACAAGGTGATGAAGCAGCT |
| | | GAAGAGAAGAAGATACACCGGCTGGGGCAGACTGAGCAGAAAGCTGATCAACGGCATCA |
| | | GAGACAAGCAGAGCGGCAAGACCATCCTGGACTTCCTGAAGAGTGACGGCTTCGCCAAC |
| | | AGAAACTTCATGCAGCTGATCCACGACGACAGCCTGACCTTCAAGGAGGACATCCAGAA |
| | | GGCCCAGGTGAGCGGCCAGGGCGACAGCCTGCACGAGCACATCGCCAACCTGGCCGGCA |
| | | GCCCCGCCATCAAGAAGGGCATCCTGCAGACCGTGAAGGTGGTGGACGAGCTGGTGAAG |
| | | GTGATGGGCAGACACAAGCCCGAGAACATCGTGATCGAGATGGCCAGAGAGAACCAGAC |
| | | CACCCAGAAGGGCCAGAAGAACAGCAGAGAGAGAATGAAGAGAATCGAGGAGGGCATCA |
| | | AGGAGCTGGGCAGCCAGATCCTGAAGGAGCACCCCGTGGAGAACACCCAGCTGCAGAAC |
| | | GAGAAGCTGTACCTGTACTACCTGCAGAACGGCAGAGACATGTACGTGGACCAGGAGCT |
| | | GGACATCAACAGACTGAGCGACTACGACGTGGACGCCATCGTGCCCCAGAGCTTCCTGA |
| | | AGGACGACAGCATCGACAACAAGGTGCTGACCAGAAGCGACAAGAACAGAGGCAAGAGC |
| | | GACAACGTGCCCAGCGAGGAGGTGGTGAAGAAGATGAAGAACTACTGGAGACAGCTGCT |
| | | GAACGCCAAGCTGATCACCCAGAGAAAGTTCGACAACCTGACCAAGGCCGAGAGAGGCG |
| | | GCCTGAGCGAGCTGGACAAGGCCGGCTTCATCAAGAGACAGCTGGTGGAGACCAGACAG |
| | | ATCACCAAGCACGTGGCCCAGATCCTGGACAGCAGAATGAACACCAAGTACGACGAGAA |
| | | CGACAAGCTGATCAGAGAGGTGAAGGTGATCACCCTGAAGAGTAAGCTGGTGAGCGACT |
| | | TCAGAAAGGACTTCCAGTTCTACAAGGTGAGAGAGATCAACAACTACCACCACGCCCAC |
| | | GACGCCTACCTGAACGCCGTGGTGGGCACCGCCCTGATCAAGAAGTACCCCAAGCTGGA |
| | | GAGCGAGTTCGTGTACGGCGACTACAAGGTGTACGACGTGAGAAAGATGATCGCCAAGA |
| | | GCGAGCAGGAGATCGGCAAGGCCACCGCCAAGTACTTCTTCTACAGCAACATCATGAAC |
| | | TTCTTCAAGACCGAGATCACCCTGGCCAACGGCGAGATCAGAAAGAGACCCCTGATCGA |
| | | GACCAACGGCGAGACCGGCGAGATCGTGTGGGACAAGGGCAGAGACTTCGCCACCGTGA |
| | | GAAAGGTGCTGAGCATGCCCCAGGTGAACATCGTGAAGAAGACCGAGGTGCAGACCGGC |
| | | GGCTTCAGCAAGGAGAGCATCCTGCCCAAGAGAAACAGCGACAAGCTGATCGCCAGAAA |
| | | GAAGGACTGGGACCCCAAGAAGTACGGCGGCTTCGACAGCCCCACCGTGGCCTACAGCG |
| | | TGCTGGTGGTGGCCAAGGTGGAGAAGGGCAAGAGCAAGAAGCTGAAGAGTGTGAAGGAG |
| | | CTGCTGGGCATCACCATCATGGAGAGAAGCAGCTTCGAGAAGAACCCCATCGACTTCCT |
| | | GGAGGCCAAGGGCTACAAGGAGGTGAAGAAGGACCTGATCATCAAGCTGCCCAAGTACA |
| | | GCCTGTTCGAGCTGGAGAACGGCAGAAAGAGAATGCTGGCCAGCGCCGGCGAGCTGCAG |
| | | AAGGGCAACGAGCTGGCCCTGCCCAGCAAGTACGTGAACTTCCTGTACCTGGCCAGCCA |
| | | CTACGAGAAGCTGAAGGGCAGCCCCGAGGACAACGAGCAGAAGCAGCTGTTCGTGGAGC |
| | | AGCACAAGCACTACCTGGACGAGATCATCGAGCAGATCAGCGAGTTCAGCAAGAGAGTG |
| | | ATCCTGGCCGACGCCAACCTGGACAAGGTGCTGAGCGCCTACAACAAGCACAGAGACAA |
| | | GCCCATCAGAGAGCAGGCCGAGAACATCATCCACCTGTTCACCCTGACCAACCTGGGCG |
| | | CCCCCGCCGCCTTCAAGTACTTCGACACCACCATCGACAGAAAGAGATACACCAGCACC |
| | | AAGGAGGTGCTGGACGCCACCCTGATCCACCAGAGCATCACCGGCCTGTACGAGACCAG |
| | | AATCGACCTGAGCCAGCTGGGGGGCGACAGCGGCGGCAGCAGCGGCGGCAGCAGCGGCA |
| | | GCGAGACCCCCGGCACCAGCGAGAGCGCCACCCCCGAGAGCAGCGGCGGCAGCAGCGGC |
| | | GGCAGCAGCACCCTGAACATCGAGGACGAGTACAGACTGCACGAGACCAGCAAGGAGCC |
| | | CGACGTGAGCCTGGGCAGCACCTGGCTGAGCGACTTCCCCCAGGCCTGGGCCGAGACCG |
| | | GCGGCATGGGCCTGGCCGTGAGACAGGCCCCCCTGATCATCCCCCTGAAGGCCACCAGC |
| | | ACCCCCGTGAGCATCAAGCAGTACCCCATGAGCCAGGAGGCCAGACTGGGCATCAAGCC |
| | | CCACATCCAGAGACTGCTGGACCAGGGCATCCTGGTGCCCTGCCAGAGCCCCTGGAACA |
| | | CCCCCCTGCTGCCCGTGAAGAAGCCCGGCACCAACGACTACAGACCCGTGCAGGACCTG |
| | | AGAGAGGTGAACAAGAGAGTGGAGGACATCCACCCCACCGTGCCCAACCCCTACAACCT |
| | | GCTGAGCGGCCTGCCCCCCAGCCACCAGTGGTACACCGTGCTGGACCTGAAGGACGCCT |
| | | TCTTCTGCCTGAGACTGCACCCCACCAGCCAGCCCCTGTTCGCCTTCGAGTGGAGAGAC |
| | | CCCGAGATGGGCATCAGCGGCCAGCTGACCTGGACCAGACTGCCCCAGGGCTTCAAGAA |
| | | CAGCCCCACCCTGTTCAACGAGGCCCTGCACAGAGACCTGGCCGACTTCAGAATCCAGC |
| | | ACCCCGACCTGATCCTGCTGCAGTACGTGGACGACCTGCTGCTGGCCGCCACCAGCGAG |
| | | CTGGACTGCCAGCAGGGCACCAGAGCCCTGCTGCAGACCCTGGGCAACCTGGGCTACAG |
| | | AGCCAGCGCCAAGAAGGCCCAGATCTGCCAGAAGCAGGTGAAGTACCTGGGCTACCTGC |
| | | TGAAGGAGGGCCAGAGATGGCTGACCGAGGCCAGAAAGGAGACCGTGATGGGCCAGCCC |
| | | ACCCCCAAGACCCCCAGACAGCTGAGAGAGTTCCTGGGCAAGGCCGGCTTCTGCAGACT |
| | | GTTCATCCCCGGCTTCGCCGAGATGGCCGCCCCCCTGTACCCCCTGACCAAGCCCGGCA |
| | | CCCTGTTCAACTGGGGCCCCGACCAGCAGAAGGCCTACCAGGAGATCAAGCAGGCCCTG |
| | | CTGACCGCCCCCGCCCTGGGCCTGCCCGACCTGACCAAGCCCTTCGAGCTGTTCGTGGA |
| | | CGAGAAGCAGGGCTACGCCAAGGGCGTGCTGACCCAGAAGCTGGGCCCCTGGAGAAGAC |
| | | CCGTGGCCTACCTGAGCAAGAAGCTGGACCCCGTGGCCGCCGGCTGGCCCCCCTGCCTG |
| | | AGAATGGTGGCCGCCATCGCCGTGCTGACCAAGGACGCCGGCAAGCTGACCATGGGCCA |
| | | GCCCCTGGTGATCCTGGCCCCCCACGCCGTGGAGGCCCTGGTGAAGCAGCCCCCCGACA |
| | | GATGGCTGAGCAACGCCAGAATGACCCACTACCAGGCCCTGCTGCTGGACACCGACAGA |
| | | GTGCAGTTCGGCCCCGTGGTGGCCCTGAACCCCGCCACCCTGCTGCCCCTGCCCGAGGA |
| | | GGGCCTGCAGCACAACTGCCTGGACATCCTGGCCGAGGCCCACGGCACCAGACCCGACC |
| | | TGACCGACCAGCCCCTGCCCGACGCCGACCACACCTGGTACACCGACGGCAGCAGCCTG |
| | | CTGCAGGAGGGCCAGAGAAAGGCCGGCGCCGCCGTGACCACCGAGACCGAGGTGATCTG |
| | | GGCCAAGGCCCTGCCCGCCGGCACCAGCGCCCAGAGAGCCGAGCTGATCGCCCTGACCC |
| | | AGGCCCTGAAGATGGCCGAGGGCAAGAAGCTGAACGTGTACACCGACAGCAGATACGCC |
| | | TTCGCCACCGCCCACATCCACGGCGAGATCTACAGAAGAAGAGGCTGGCTGACCAGCGA |
| | | GGGCAAGGAGATCAAGAACAAGGACGAGATCCTGGCCCTGCTGAAGGCCCTGTTCCTGC |
| | | CCAAGAGACTGAGCATCATCCACTGCCCCGGCCACCAGAAGGGCCACAGCGCCGAGGCC |
| | | AGAGGCAACAGAATGGCCGACCAGGCCGCCAGAAAGGCCGCCATCACCGAGACCCCCGA |
| | | CACCAGCACCCTGCTGATCGAGAACAGCAGCCCCAGCGGCGGCAGCAAGAGAACCGCCG |
| | | ACGGCAGCGAGTTCGAGCCCAAGAAGAAGAGAAAGGTGGGCGGCAGCGTGAGCGGCTGG |
| | | AGACTGTTCAAGAAGATCAGCGGCAGCGGCAAGGACAAGAAATCCGATGGCAAGGACAG |
| | | CCAGAAAAAATGA |
| 643 | PL1924 | MKRTADGSEFESPKKKRKVDKKYSIGLDIGTNSVGWAVITDEYKVPSKKFKVLGNTDRH |
| | _AA | SIKKNLIGALLFDSGETAEATRLKRTARRRYTRRKNRICYLQEIFSNEMAKVDDSFFHR |
| | | LEESFLVEEDKKHERHPIFGNIVDEVAYHEKYPTIYHLRKKLVDSTDKADLRLIYLALA |
| | | HMIKFRGHFLIEGDLNPDNSDVDKLFIQLVQTYNQLFEENPINASGVDAKAILSARLSK |
| | | SRRLENLIAQLPGEKKNGLFGNLIALSLGLTPNFKSNFDLAEDAKLQLSKDTYDDDLDN |
| | | LLAQIGDQYADLFLAAKNLSDAILLSDILRVNTEITKAPLSASMIKRYDEHHQDLTLLK |
| | | ALVRQQLPEKYKEIFFDQSKNGYAGYIDGGASQEEFYKFIKPILEKMDGTEELLVKLNR |
| | | EDLLRKQRTFDNGSIPHQIHLGELHAILRRQEDFYPFLKDNREKIEKILTFRIPYYVGP |
| | | LARGNSRFAWMTRKSEETITPWNFEEVVDKGASAQSFIERMTNFDKNLPNEKVLPKHSL |
| | | LYEYFTVYNELTKVKYVTEGMRKPAFLSGEQKKAIVDLLFKTNRKVTVKQLKEDYFKKI |
| | | ECFDSVEISGVEDRFNASLGTYHDLLKIIKDKDFLDNEENEDILEDIVLTLTLFEDREM |
| | | IEERLKTYAHLFDDKVMKQLKRRRYTGWGRLSRKLINGIRDKQSGKTILDFLKSDGFAN |
| | | RNFMQLIHDDSLTFKEDIQKAQVSGQGDSLHEHIANLAGSPAIKKGILQTVKVVDELVK |
| | | VMGRHKPENIVIEMARENQTTQKGQKNSRERMKRIEEGIKELGSQILKEHPVENTQLQN |
| | | EKLYLYYLQNGRDMYVDQELDINRLSDYDVDAIVPQSFLKDDSIDNKVLTRSDKNRGKS |
| | | DNVPSEEVVKKMKNYWRQLLNAKLITQRKFDNLTKAERGGLSELDKAGFIKRQLVETRQ |
| | | ITKHVAQILDSRMNTKYDENDKLIREVKVITLKSKLVSDFRKDFQFYKVREINNYHHAH |
| | | DAYLNAVVGTALIKKYPKLESEFVYGDYKVYDVRKMIAKSEQEIGKATAKYFFYSNIMN |
| | | FFKTEITLANGEIRKRPLIETNGETGEIVWDKGRDFATVRKVLSMPQVNIVKKTEVQTG |
| | | GFSKESILPKRNSDKLIARKKDWDPKKYGGFDSPTVAYSVLWVAKVEKGKSKKLKSVKE |
| | | LLGITIMERSSFEKNPIDFLEAKGYKEVKKDLIIKLPKYSLFELENGRKRMLASAGELQ |
| | | KGNELALPSKYVNFLYLASHYEKLKGSPEDNEQKQLFVEQHKHYLDEIIEQISEFSKRV |
| | | ILADANLDKVLSAYNKHRDKPIREQAENIIHLFTLTNLGAPAAFKYFDTTIDRKRYTST |
| | | KEVLDATLIHQSITGLYETRIDLSQLGGDSGGSSGGSSGSETPGTSESATPESSGGSSG |
| | | GSSTLNIEDEYRLHETSKEPDVSLGSTWLSDFPQAWAETGGMGLAVRQAPLIIPLKATS |
| | | TPVSIKQYPMSQEARLGIKPHIQRLLDQGILVPCQSPWNTPLLPVKKPGTNDYRPVQDL |
| | | REVNKRVEDIHPTVPNPYNLLSGLPPSHQWYTVLDLKDAFFCLRLHPTSQPLFAFEWRD |
| | | PEMGISGQLTWTRLPQGFKNSPTLFNEALHRDLADFRIQHPDLILLQYVDDLLLAATSE |
| | | LDCQQGTRALLQTLGNLGYRASAKKAQICQKQVKYLGYLLKEGQRWLTEARKETVMGQP |
| | | TPKTPRQLREFLGKAGFCRLFIPGFAEMAAPLYPLTKPGTLFNWGPDQQKAYQEIKQAL |
| | | LTAPALGLPDLTKPFELFVDEKQGYAKGVLTQKLGPWRRPVAYLSKKLDPVAAGWPPCL |
| | | RMVAAIAVLTKDAGKLTMGQPLVILAPHAVEALVKQPPDRWLSNARMTHYQALLLDTDR |
| | | VQFGPVVALNPATLLPLPEEGLQHNCLDILAEAHGTRPDLTDQPLPDADHTWYTDGSSL |
| | | LQEGQRKAGAAVTTETEVIWAKALPAGTSAQRAELIALTQALKMAEGKKLNVYTDSRYA |
| | | FATAHIHGEIYRRRGWLTSEGKEIKNKDEILALLKALFLPKRLSIIHCPGHQKGHSAEA |
| | | RGNRMADQAARKAAITETPDTSTLLIENSSPSGGSKRTADGSEFEPKKKRKVGSGKDKK |
| | | SDGKDSQKK* |
| 644 | PL1924_ | ATGAAGAGAACCGCCGACGGCAGCGAGTTCGAGAGCCCCAAGAAGAAGAGAAAGGTGGA |
| | DNA | CAAGAAGTACAGCATCGGCCTGGACATCGGCACCAACAGCGTGGGCTGGGCCGTGATCA |
| | | CCGACGAGTACAAGGTGCCCAGCAAGAAGTTCAAGGTGCTGGGCAACACCGACAGACAC |
| | | AGCATCAAGAAGAACCTGATCGGCGCCCTGCTGTTCGACAGCGGCGAGACCGCCGAGGC |
| | | CACCAGACTGAAGAGAACCGCCAGAAGAAGATACACCAGAAGAAAGAACAGAATCTGCT |
| | | ACCTGCAGGAGATCTTCAGCAACGAGATGGCCAAGGTGGACGACAGCTTCTTCCACAGA |
| | | CTGGAGGAGAGCTTCCTGGTGGAGGAGGACAAGAAGCACGAGAGACACCCCATCTTCGG |
| | | CAACATCGTGGACGAGGTGGCCTACCACGAGAAGTACCCCACCATCTACCACCTGAGAA |
| | | AGAAGCTGGTGGACAGCACCGACAAGGCCGACCTGAGACTGATCTACCTGGCCCTGGCC |
| | | CACATGATCAAGTTCAGAGGCCACTTCCTGATCGAGGGCGACCTGAACCCCGACAACAG |
| | | CGACGTGGACAAGCTGTTCATCCAGCTGGTGCAGACCTACAACCAGCTGTTCGAGGAGA |
| | | ACCCCATCAACGCCAGCGGCGTGGACGCCAAGGCCATCCTGAGCGCCAGACTGAGCAAG |
| | | AGCAGAAGACTGGAGAACCTGATCGCCCAGCTGCCCGGCGAGAAGAAGAACGGCCTGTT |
| | | CGGCAACCTGATCGCCCTGAGCCTGGGCCTGACCCCCAACTTCAAGAGCAACTTCGACC |
| | | TGGCCGAGGACGCCAAGCTGCAGCTGAGCAAGGACACCTACGACGACGACCTGGACAAC |
| | | CTGCTGGCCCAGATCGGCGACCAGTACGCCGACCTGTTCCTGGCCGCCAAGAACCTGAG |
| | | CGACGCCATCCTGCTGAGCGACATCCTGAGAGTGAACACCGAGATCACCAAGGCCCCCC |
| | | TGAGCGCCAGCATGATCAAGAGATACGACGAGCACCACCAGGACCTGACCCTGCTGAAG |
| | | GCCCTGGTGAGACAGCAGCTGCCCGAGAAGTACAAGGAGATCTTCTTCGACCAGAGCAA |
| | | GAACGGCTACGCCGGCTACATCGACGGCGGCGCCAGCCAGGAGGAGTTCTACAAGTTCA |
| | | TCAAGCCCATCCTGGAGAAGATGGACGGCACCGAGGAGCTGCTGGTGAAGCTGAACAGA |
| | | GAGGACCTGCTGAGAAAGCAGAGAACCTTCGACAACGGCAGCATCCCCCACCAGATCCA |
| | | CCTGGGCGAGCTGCACGCCATCCTGAGAAGACAGGAGGACTTCTACCCCTTCCTGAAGG |
| | | ACAACAGAGAGAAGATCGAGAAGATCCTGACCTTCAGAATCCCCTACTACGTGGGCCCC |
| | | CTGGCCAGAGGCAACAGCAGATTCGCCTGGATGACCAGAAAGAGCGAGGAGACCATCAC |
| | | CCCCTGGAACTTCGAGGAGGTGGTGGACAAGGGCGCCAGCGCCCAGAGCTTCATCGAGA |
| | | GAATGACCAACTTCGACAAGAACCTGCCCAACGAGAAGGTGCTGCCCAAGCACAGCCTG |
| | | CTGTACGAGTACTTCACCGTGTACAACGAGCTGACCAAGGTGAAGTACGTGACCGAGGG |
| | | CATGAGAAAGCCCGCCTTCCTGAGCGGCGAGCAGAAGAAGGCCATCGTGGACCTGCTGT |
| | | TCAAGACCAACAGAAAGGTGACCGTGAAGCAGCTGAAGGAGGACTACTTCAAGAAGATC |
| | | GAGTGCTTCGACAGCGTGGAGATCAGCGGCGTGGAGGACAGATTCAACGCCAGCCTGGG |
| | | CACCTACCACGACCTGCTGAAGATCATCAAGGACAAGGACTTCCTGGACAACGAGGAGA |
| | | ACGAGGACATCCTGGAGGACATCGTGCTGACCCTGACCCTGTTCGAGGACAGAGAGATG |
| | | ATCGAGGAGAGACTGAAGACCTACGCCCACCTGTTCGACGACAAGGTGATGAAGCAGCT |
| | | GAAGAGAAGAAGATACACCGGCTGGGGCAGACTGAGCAGAAAGCTGATCAACGGCATCA |
| | | GAGACAAGCAGAGCGGCAAGACCATCCTGGACTTCCTGAAGAGTGACGGCTTCGCCAAC |
| | | AGAAACTTCATGCAGCTGATCCACGACGACAGCCTGACCTTCAAGGAGGACATCCAGAA |
| | | GGCCCAGGTGAGCGGCCAGGGCGACAGCCTGCACGAGCACATCGCCAACCTGGCCGGCA |
| | | GCCCCGCCATCAAGAAGGGCATCCTGCAGACCGTGAAGGTGGTGGACGAGCTGGTGAAG |
| | | GTGATGGGCAGACACAAGCCCGAGAACATCGTGATCGAGATGGCCAGAGAGAACCAGAC |
| | | CACCCAGAAGGGCCAGAAGAACAGCAGAGAGAGAATGAAGAGAATCGAGGAGGGCATCA |
| | | AGGAGCTGGGCAGCCAGATCCTGAAGGAGCACCCCGTGGAGAACACCCAGCTGCAGAAC |
| | | GAGAAGCTGTACCTGTACTACCTGCAGAACGGCAGAGACATGTACGTGGACCAGGAGCT |
| | | GGACATCAACAGACTGAGCGACTACGACGTGGACGCCATCGTGCCCCAGAGCTTCCTGA |
| | | AGGACGACAGCATCGACAACAAGGTGCTGACCAGAAGCGACAAGAACAGAGGCAAGAGC |
| | | GACAACGTGCCCAGCGAGGAGGTGGTGAAGAAGATGAAGAACTACTGGAGACAGCTGCT |
| | | GAACGCCAAGCTGATCACCCAGAGAAAGTTCGACAACCTGACCAAGGCCGAGAGAGGCG |
| | | GCCTGAGCGAGCTGGACAAGGCCGGCTTCATCAAGAGACAGCTGGTGGAGACCAGACAG |
| | | ATCACCAAGCACGTGGCCCAGATCCTGGACAGCAGAATGAACACCAAGTACGACGAGAA |
| | | CGACAAGCTGATCAGAGAGGTGAAGGTGATCACCCTGAAGAGTAAGCTGGTGAGCGACT |
| | | TCAGAAAGGACTTCCAGTTCTACAAGGTGAGAGAGATCAACAACTACCACCACGCCCAC |
| | | GACGCCTACCTGAACGCCGTGGTGGGCACCGCCCTGATCAAGAAGTACCCCAAGCTGGA |
| | | GAGCGAGTTCGTGTACGGCGACTACAAGGTGTACGACGTGAGAAAGATGATCGCCAAGA |
| | | GCGAGCAGGAGATCGGCAAGGCCACCGCCAAGTACTTCTTCTACAGCAACATCATGAAC |
| | | TTCTTCAAGACCGAGATCACCCTGGCCAACGGCGAGATCAGAAAGAGACCCCTGATCGA |
| | | GACCAACGGCGAGACCGGCGAGATCGTGTGGGACAAGGGCAGAGACTTCGCCACCGTGA |
| | | GAAAGGTGCTGAGCATGCCCCAGGTGAACATCGTGAAGAAGACCGAGGTGCAGACCGGC |
| | | GGCTTCAGCAAGGAGAGCATCCTGCCCAAGAGAAACAGCGACAAGCTGATCGCCAGAAA |
| | | GAAGGACTGGGACCCCAAGAAGTACGGCGGCTTCGACAGCCCCACCGTGGCCTACAGCG |
| | | TGCTGGTGGTGGCCAAGGTGGAGAAGGGCAAGAGCAAGAAGCTGAAGAGTGTGAAGGAG |
| | | CTGCTGGGCATCACCATCATGGAGAGAAGCAGCTTCGAGAAGAACCCCATCGACTTCCT |
| | | GGAGGCCAAGGGCTACAAGGAGGTGAAGAAGGACCTGATCATCAAGCTGCCCAAGTACA |
| | | GCCTGTTCGAGCTGGAGAACGGCAGAAAGAGAATGCTGGCCAGCGCCGGCGAGCTGCAG |
| | | AAGGGCAACGAGCTGGCCCTGCCCAGCAAGTACGTGAACTTCCTGTACCTGGCCAGCCA |
| | | CTACGAGAAGCTGAAGGGCAGCCCCGAGGACAACGAGCAGAAGCAGCTGTTCGTGGAGC |
| | | AGCACAAGCACTACCTGGACGAGATCATCGAGCAGATCAGCGAGTTCAGCAAGAGAGTG |
| | | ATCCTGGCCGACGCCAACCTGGACAAGGTGCTGAGCGCCTACAACAAGCACAGAGACAA |
| | | GCCCATCAGAGAGCAGGCCGAGAACATCATCCACCTGTTCACCCTGACCAACCTGGGCG |
| | | CCCCCGCCGCCTTCAAGTACTTCGACACCACCATCGACAGAAAGAGATACACCAGCACC |
| | | AAGGAGGTGCTGGACGCCACCCTGATCCACCAGAGCATCACCGGCCTGTACGAGACCAG |
| | | AATCGACCTGAGCCAGCTGGGGGGCGACAGCGGCGGCAGCAGCGGCGGCAGCAGCGGCA |
| | | GCGAGACCCCCGGCACCAGCGAGAGCGCCACCCCCGAGAGCAGCGGCGGCAGCAGCGGC |
| | | GGCAGCAGCACCCTGAACATCGAGGACGAGTACAGACTGCACGAGACCAGCAAGGAGCC |
| | | CGACGTGAGCCTGGGCAGCACCTGGCTGAGCGACTTCCCCCAGGCCTGGGCCGAGACCG |
| | | GCGGCATGGGCCTGGCCGTGAGACAGGCCCCCCTGATCATCCCCCTGAAGGCCACCAGC |
| | | ACCCCCGTGAGCATCAAGCAGTACCCCATGAGCCAGGAGGCCAGACTGGGCATCAAGCC |
| | | CCACATCCAGAGACTGCTGGACCAGGGCATCCTGGTGCCCTGCCAGAGCCCCTGGAACA |
| | | CCCCCCTGCTGCCCGTGAAGAAGCCCGGCACCAACGACTACAGACCCGTGCAGGACCTG |
| | | AGAGAGGTGAACAAGAGAGTGGAGGACATCCACCCCACCGTGCCCAACCCCTACAACCT |
| | | GCTGAGCGGCCTGCCCCCCAGCCACCAGTGGTACACCGTGCTGGACCTGAAGGACGCCT |
| | | TCTTCTGCCTGAGACTGCACCCCACCAGCCAGCCCCTGTTCGCCTTCGAGTGGAGAGAC |
| | | CCCGAGATGGGCATCAGCGGCCAGCTGACCTGGACCAGACTGCCCCAGGGCTTCAAGAA |
| | | CAGCCCCACCCTGTTCAACGAGGCCCTGCACAGAGACCTGGCCGACTTCAGAATCCAGC |
| | | ACCCCGACCTGATCCTGCTGCAGTACGTGGACGACCTGCTGCTGGCCGCCACCAGCGAG |
| | | CTGGACTGCCAGCAGGGCACCAGAGCCCTGCTGCAGACCCTGGGCAACCTGGGCTACAG |
| | | AGCCAGCGCCAAGAAGGCCCAGATCTGCCAGAAGCAGGTGAAGTACCTGGGCTACCTGC |
| | | TGAAGGAGGGCCAGAGATGGCTGACCGAGGCCAGAAAGGAGACCGTGATGGGCCAGCCC |
| | | ACCCCCAAGACCCCCAGACAGCTGAGAGAGTTCCTGGGCAAGGCCGGCTTCTGCAGACT |
| | | GTTCATCCCCGGCTTCGCCGAGATGGCCGCCCCCCTGTACCCCCTGACCAAGCCCGGCA |
| | | CCCTGTTCAACTGGGGCCCCGACCAGCAGAAGGCCTACCAGGAGATCAAGCAGGCCCTG |
| | | CTGACCGCCCCCGCCCTGGGCCTGCCCGACCTGACCAAGCCCTTCGAGCTGTTCGTGGA |
| | | CGAGAAGCAGGGCTACGCCAAGGGCGTGCTGACCCAGAAGCTGGGCCCCTGGAGAAGAC |
| | | CCGTGGCCTACCTGAGCAAGAAGCTGGACCCCGTGGCCGCCGGCTGGCCCCCCTGCCTG |
| | | AGAATGGTGGCCGCCATCGCCGTGCTGACCAAGGACGCCGGCAAGCTGACCATGGGCCA |
| | | GCCCCTGGTGATCCTGGCCCCCCACGCCGTGGAGGCCCTGGTGAAGCAGCCCCCCGACA |
| | | GATGGCTGAGCAACGCCAGAATGACCCACTACCAGGCCCTGCTGCTGGACACCGACAGA |
| | | GTGCAGTTCGGCCCCGTGGTGGCCCTGAACCCCGCCACCCTGCTGCCCCTGCCCGAGGA |
| | | GGGCCTGCAGCACAACTGCCTGGACATCCTGGCCGAGGCCCACGGCACCAGACCCGACC |
| | | TGACCGACCAGCCCCTGCCCGACGCCGACCACACCTGGTACACCGACGGCAGCAGCCTG |
| | | CTGCAGGAGGGCCAGAGAAAGGCCGGCGCCGCCGTGACCACCGAGACCGAGGTGATCTG |
| | | GGCCAAGGCCCTGCCCGCCGGCACCAGCGCCCAGAGAGCCGAGCTGATCGCCCTGACCC |
| | | AGGCCCTGAAGATGGCCGAGGGCAAGAAGCTGAACGTGTACACCGACAGCAGATACGCC |
| | | TTCGCCACCGCCCACATCCACGGCGAGATCTACAGAAGAAGAGGCTGGCTGACCAGCGA |
| | | GGGCAAGGAGATCAAGAACAAGGACGAGATCCTGGCCCTGCTGAAGGCCCTGTTCCTGC |
| | | CCAAGAGACTGAGCATCATCCACTGCCCCGGCCACCAGAAGGGCCACAGCGCCGAGGCC |
| | | AGAGGCAACAGAATGGCCGACCAGGCCGCCAGAAAGGCCGCCATCACCGAGACCCCCGA |
| | | CACCAGCACCCTGCTGATCGAGAACAGCAGCCCCAGCGGCGGCAGCAAGAGAACCGCCG |
| | | ACGGCAGCGAGTTCGAGCCCAAGAAGAAGAGAAAGGTGGGCAGCGGCAAGGACAAGAAA |
| | | TCCGATGGCAAGGACAGCCAGAAAAAATGA |
| 645 | PL1925 | MKRTADGSEFESPKKKRKVDKKYSIGLDIGTNSVGWAVITDEYKVPSKKFKVLGNTDRH |
| | _AA | SIKKNLIGALLFDSGETAEATRLKRTARRRYTRRKNRICYLQEIFSNEMAKVDDSFFHR |
| | | LEESFLVEEDKKHERHPIFGNIVDEVAYHEKYPTIYHLRKKLVDSTDKADLRLIYLALA |
| | | HMIKFRGHFLIEGDLNPDNSDVDKLFIQLVQTYNQLFEENPINASGVDAKAILSARLSK |
| | | SRRLENLIAQLPGEKKNGLFGNLIALSLGLTPNFKSNFDLAEDAKLQLSKDTYDDDLDN |
| | | LLAQIGDQYADLFLAAKNLSDAILLSDILRVNTEITKAPLSASMIKRYDEHHQDLTLLK |
| | | ALVRQQLPEKYKEIFFDQSKNGYAGYIDGGASQEEFYKFIKPILEKMDGTEELLVKLNR |
| | | EDLLRKQRTFDNGSIPHQIHLGELHAILRRQEDFYPFLKDNREKIEKILTFRIPYYVGP |
| | | LARGNSRFAWMTRKSEETITPWNFEEVVDKGASAQSFIERMTNFDKNLPNEKVLPKHSL |
| | | LYEYFTVYNELTKVKYVTEGMRKPAFLSGEQKKAIVDLLFKTNRKVTVKQLKEDYFKKI |
| | | ECFDSVEISGVEDRFNASLGTYHDLLKIIKDKDFLDNEENEDILEDIVLTLTLFEDREM |
| | | IEERLKTYAHLFDDKVMKQLKRRRYTGWGRLSRKLINGIRDKQSGKTILDFLKSDGFAN |
| | | RNFMQLIHDDSLTFKEDIQKAQVSGQGDSLHEHIANLAGSPAIKKGILQTVKVVDELVK |
| | | VMGRHKPENIVIEMARENQTTQKGQKNSRERMKRIEEGIKELGSQILKEHPVENTQLQN |
| | | EKLYLYYLQNGRDMYVDQELDINRLSDYDVDAIVPQSFLKDDSIDNKVLTRSDKNRGKS |
| | | DNVPSEEVVKKMKNYWRQLLNAKLITQRKFDNLTKAERGGLSELDKAGFIKRQLVETRQ |
| | | ITKHVAQILDSRMNTKYDENDKLIREVKVITLKSKLVSDFRKDFQFYKVREINNYHHAH |
| | | DAYLNAVVGTALIKKYPKLESEFVYGDYKVYDVRKMIAKSEQEIGKATAKYFFYSNIMN |
| | | FFKTEITLANGEIRKRPLIETNGETGEIVWDKGRDFATVRKVLSMPQVNIVKKTEVQTG |
| | | GFSKESILPKRNSDKLIARKKDWDPKKYGGFDSPTVAYSVLWVAKVEKGKSKKLKSVKE |
| | | LLGITIMERSSFEKNPIDFLEAKGYKEVKKDLIIKLPKYSLFELENGRKRMLASAGELQ |
| | | KGNELALPSKYVNFLYLASHYEKLKGSPEDNEQKQLFVEQHKHYLDEIIEQISEFSKRV |
| | | ILADANLDKVLSAYNKHRDKPIREQAENIIHLFTLTNLGAPAAFKYFDTTIDRKRYTST |
| | | KEVLDATLIHQSITGLYETRIDLSQLGGDSGGSSGGSSGSETPGTSESATPESSGGSSG |
| | | GSSTLNIEDEYRLHETSKEPDVSLGSTWLSDFPQAWAETGGMGLAVRQAPLIIPLKATS |
| | | TPVSIKQYPMSQEARLGIKPHIQRLLDQGILVPCQSPWNTPLLPVKKPGTNDYRPVQDL |
| | | REVNKRVEDIHPTVPNPYNLLSGLPPSHQWYTVLDLKDAFFCLRLHPTSQPLFAFEWRD |
| | | PEMGISGQLTWTRLPQGFKNSPTLFNEALHRDLADFRIQHPDLILLQYVDDLLLAATSE |
| | | LDCQQGTRALLQTLGNLGYRASAKKAQICQKQVKYLGYLLKEGQRWLTEARKETVMGQP |
| | | TPKTPRQLREFLGKAGFCRLFIPGFAEMAAPLYPLTKPGTLFNWGPDQQKAYQEIKQAL |
| | | LTAPALGLPDLTKPFELFVDEKQGYAKGVLTQKLGPWRRPVAYLSKKLDPVAAGWPPCL |
| | | RMVAAIAVLTKDAGKLTMGQPLVILAPHAVEALVKQPPDRWLSNARMTHYQALLLDTDR |
| | | VQFGPVVALNPATLLPLPEEGLQHNCLDILAEAHGTRPDLTDQPLPDADHTWYTDGSSL |
| | | LQEGQRKAGAAVTTETEVIWAKALPAGTSAQRAELIALTQALKMAEGKKLNVYTDSRYA |
| | | FATAHIHGEIYRRRGWLTSEGKEIKNKDEILALLKALFLPKRLSIIHCPGHQKGHSAEA |
| | | RGNRMADQAARKAAITETPDTSTLLIENSSPSGGSKRTADGSEFEPKKKRKVGSGKDKK |
| | | SDGKDSQKK* |
| 646 | PL1925_ | ATGAAGAGAACCGCCGACGGCAGCGAGTTCGAGAGCCCCAAGAAGAAGAGAAAGGTGGA |
| | DNA | CAAGAAGTACAGCATCGGCCTGGACATCGGCACCAACAGCGTGGGCTGGGCCGTGATCA |
| | | CCGACGAGTACAAGGTGCCCAGCAAGAAGTTCAAGGTGCTGGGCAACACCGACAGACAC |
| | | AGCATCAAGAAGAACCTGATCGGCGCCCTGCTGTTCGACAGCGGCGAGACCGCCGAGGC |
| | | CACCAGACTGAAGAGAACCGCCAGAAGAAGATACACCAGAAGAAAGAACAGAATCTGCT |
| | | ACCTGCAGGAGATCTTCAGCAACGAGATGGCCAAGGTGGACGACAGCTTCTTCCACAGA |
| | | CTGGAGGAGAGCTTCCTGGTGGAGGAGGACAAGAAGCACGAGAGACACCCCATCTTCGG |
| | | CAACATCGTGGACGAGGTGGCCTACCACGAGAAGTACCCCACCATCTACCACCTGAGAA |
| | | AGAAGCTGGTGGACAGCACCGACAAGGCCGACCTGAGACTGATCTACCTGGCCCTGGCC |
| | | CACATGATCAAGTTCAGAGGCCACTTCCTGATCGAGGGCGACCTGAACCCCGACAACAG |
| | | CGACGTGGACAAGCTGTTCATCCAGCTGGTGCAGACCTACAACCAGCTGTTCGAGGAGA |
| | | ACCCCATCAACGCCAGCGGCGTGGACGCCAAGGCCATCCTGAGCGCCAGACTGAGCAAG |
| | | AGCAGAAGACTGGAGAACCTGATCGCCCAGCTGCCCGGCGAGAAGAAGAACGGCCTGTT |
| | | CGGCAACCTGATCGCCCTGAGCCTGGGCCTGACCCCCAACTTCAAGAGCAACTTCGACC |
| | | TGGCCGAGGACGCCAAGCTGCAGCTGAGCAAGGACACCTACGACGACGACCTGGACAAC |
| | | CTGCTGGCCCAGATCGGCGACCAGTACGCCGACCTGTTCCTGGCCGCCAAGAACCTGAG |
| | | CGACGCCATCCTGCTGAGCGACATCCTGAGAGTGAACACCGAGATCACCAAGGCCCCCC |
| | | TGAGCGCCAGCATGATCAAGAGATACGACGAGCACCACCAGGACCTGACCCTGCTGAAG |
| | | GCCCTGGTGAGACAGCAGCTGCCCGAGAAGTACAAGGAGATCTTCTTCGACCAGAGCAA |
| | | GAACGGCTACGCCGGCTACATCGACGGCGGCGCCAGCCAGGAGGAGTTCTACAAGTTCA |
| | | TCAAGCCCATCCTGGAGAAGATGGACGGCACCGAGGAGCTGCTGGTGAAGCTGAACAGA |
| | | GAGGACCTGCTGAGAAAGCAGAGAACCTTCGACAACGGCAGCATCCCCCACCAGATCCA |
| | | CCTGGGCGAGCTGCACGCCATCCTGAGAAGACAGGAGGACTTCTACCCCTTCCTGAAGG |
| | | ACAACAGAGAGAAGATCGAGAAGATCCTGACCTTCAGAATCCCCTACTACGTGGGCCCC |
| | | CTGGCCAGAGGCAACAGCAGATTCGCCTGGATGACCAGAAAGAGCGAGGAGACCATCAC |
| | | CCCCTGGAACTTCGAGGAGGTGGTGGACAAGGGCGCCAGCGCCCAGAGCTTCATCGAGA |
| | | GAATGACCAACTTCGACAAGAACCTGCCCAACGAGAAGGTGCTGCCCAAGCACAGCCTG |
| | | CTGTACGAGTACTTCACCGTGTACAACGAGCTGACCAAGGTGAAGTACGTGACCGAGGG |
| | | CATGAGAAAGCCCGCCTTCCTGAGCGGCGAGCAGAAGAAGGCCATCGTGGACCTGCTGT |
| | | TCAAGACCAACAGAAAGGTGACCGTGAAGCAGCTGAAGGAGGACTACTTCAAGAAGATC |
| | | GAGTGCTTCGACAGCGTGGAGATCAGCGGCGTGGAGGACAGATTCAACGCCAGCCTGGG |
| | | CACCTACCACGACCTGCTGAAGATCATCAAGGACAAGGACTTCCTGGACAACGAGGAGA |
| | | ACGAGGACATCCTGGAGGACATCGTGCTGACCCTGACCCTGTTCGAGGACAGAGAGATG |
| | | ATCGAGGAGAGACTGAAGACCTACGCCCACCTGTTCGACGACAAGGTGATGAAGCAGCT |
| | | GAAGAGAAGAAGATACACCGGCTGGGGCAGACTGAGCAGAAAGCTGATCAACGGCATCA |
| | | GAGACAAGCAGAGCGGCAAGACCATCCTGGACTTCCTGAAGAGTGACGGCTTCGCCAAC |
| | | AGAAACTTCATGCAGCTGATCCACGACGACAGCCTGACCTTCAAGGAGGACATCCAGAA |
| | | GGCCCAGGTGAGCGGCCAGGGCGACAGCCTGCACGAGCACATCGCCAACCTGGCCGGCA |
| | | GCCCCGCCATCAAGAAGGGCATCCTGCAGACCGTGAAGGTGGTGGACGAGCTGGTGAAG |
| | | GTGATGGGCAGACACAAGCCCGAGAACATCGTGATCGAGATGGCCAGAGAGAACCAGAC |
| | | CACCCAGAAGGGCCAGAAGAACAGCAGAGAGAGAATGAAGAGAATCGAGGAGGGCATCA |
| | | AGGAGCTGGGCAGCCAGATCCTGAAGGAGCACCCCGTGGAGAACACCCAGCTGCAGAAC |
| | | GAGAAGCTGTACCTGTACTACCTGCAGAACGGCAGAGACATGTACGTGGACCAGGAGCT |
| | | GGACATCAACAGACTGAGCGACTACGACGTGGACGCCATCGTGCCCCAGAGCTTCCTGA |
| | | AGGACGACAGCATCGACAACAAGGTGCTGACCAGAAGCGACAAGAACAGAGGCAAGAGC |
| | | GACAACGTGCCCAGCGAGGAGGTGGTGAAGAAGATGAAGAACTACTGGAGACAGCTGCT |
| | | GAACGCCAAGCTGATCACCCAGAGAAAGTTCGACAACCTGACCAAGGCCGAGAGAGGCG |
| | | GCCTGAGCGAGCTGGACAAGGCCGGCTTCATCAAGAGACAGCTGGTGGAGACCAGACAG |
| | | ATCACCAAGCACGTGGCCCAGATCCTGGACAGCAGAATGAACACCAAGTACGACGAGAA |
| | | CGACAAGCTGATCAGAGAGGTGAAGGTGATCACCCTGAAGAGTAAGCTGGTGAGCGACT |
| | | TCAGAAAGGACTTCCAGTTCTACAAGGTGAGAGAGATCAACAACTACCACCACGCCCAC |
| | | GACGCCTACCTGAACGCCGTGGTGGGCACCGCCCTGATCAAGAAGTACCCCAAGCTGGA |
| | | GAGCGAGTTCGTGTACGGCGACTACAAGGTGTACGACGTGAGAAAGATGATCGCCAAGA |
| | | GCGAGCAGGAGATCGGCAAGGCCACCGCCAAGTACTTCTTCTACAGCAACATCATGAAC |
| | | TTCTTCAAGACCGAGATCACCCTGGCCAACGGCGAGATCAGAAAGAGACCCCTGATCGA |
| | | GACCAACGGCGAGACCGGCGAGATCGTGTGGGACAAGGGCAGAGACTTCGCCACCGTGA |
| | | GAAAGGTGCTGAGCATGCCCCAGGTGAACATCGTGAAGAAGACCGAGGTGCAGACCGGC |
| | | GGCTTCAGCAAGGAGAGCATCCTGCCCAAGAGAAACAGCGACAAGCTGATCGCCAGAAA |
| | | GAAGGACTGGGACCCCAAGAAGTACGGCGGCTTCGACAGCCCCACCGTGGCCTACAGCG |
| | | TGCTGGTGGTGGCCAAGGTGGAGAAGGGCAAGAGCAAGAAGCTGAAGAGTGTGAAGGAG |
| | | CTGCTGGGCATCACCATCATGGAGAGAAGCAGCTTCGAGAAGAACCCCATCGACTTCCT |
| | | GGAGGCCAAGGGCTACAAGGAGGTGAAGAAGGACCTGATCATCAAGCTGCCCAAGTACA |
| | | GCCTGTTCGAGCTGGAGAACGGCAGAAAGAGAATGCTGGCCAGCGCCGGCGAGCTGCAG |
| | | AAGGGCAACGAGCTGGCCCTGCCCAGCAAGTACGTGAACTTCCTGTACCTGGCCAGCCA |
| | | CTACGAGAAGCTGAAGGGCAGCCCCGAGGACAACGAGCAGAAGCAGCTGTTCGTGGAGC |
| | | AGCACAAGCACTACCTGGACGAGATCATCGAGCAGATCAGCGAGTTCAGCAAGAGAGTG |
| | | ATCCTGGCCGACGCCAACCTGGACAAGGTGCTGAGCGCCTACAACAAGCACAGAGACAA |
| | | GCCCATCAGAGAGCAGGCCGAGAACATCATCCACCTGTTCACCCTGACCAACCTGGGCG |
| | | CCCCCGCCGCCTTCAAGTACTTCGACACCACCATCGACAGAAAGAGATACACCAGCACC |
| | | AAGGAGGTGCTGGACGCCACCCTGATCCACCAGAGCATCACCGGCCTGTACGAGACCAG |
| | | AATCGACCTGAGCCAGCTGGGGGGCGACAGCGGCGGCAGCAGCGGCGGCAGCAGCGGCA |
| | | GCGAGACCCCCGGCACCAGCGAGAGCGCCACCCCCGAGAGCAGCGGCGGCAGCAGCGGC |
| | | GGCAGCAGCACCCTGAACATCGAGGACGAGTACAGACTGCACGAGACCAGCAAGGAGCC |
| | | CGACGTGAGCCTGGGCAGCACCTGGCTGAGCGACTTCCCCCAGGCCTGGGCCGAGACCG |
| | | GCGGCATGGGCCTGGCCGTGAGACAGGCCCCCCTGATCATCCCCCTGAAGGCCACCAGC |
| | | ACCCCCGTGAGCATCAAGCAGTACCCCATGAGCCAGGAGGCCAGACTGGGCATCAAGCC |
| | | CCACATCCAGAGACTGCTGGACCAGGGCATCCTGGTGCCCTGCCAGAGCCCCTGGAACA |
| | | CCCCCCTGCTGCCCGTGAAGAAGCCCGGCACCAACGACTACAGACCCGTGCAGGACCTG |
| | | AGAGAGGTGAACAAGAGAGTGGAGGACATCCACCCCACCGTGCCCAACCCCTACAACCT |
| | | GCTGAGCGGCCTGCCCCCCAGCCACCAGTGGTACACCGTGCTGGACCTGAAGGACGCCT |
| | | TCTTCTGCCTGAGACTGCACCCCACCAGCCAGCCCCTGTTCGCCTTCGAGTGGAGAGAC |
| | | CCCGAGATGGGCATCAGCGGCCAGCTGACCTGGACCAGACTGCCCCAGGGCTTCAAGAA |
| | | CAGCCCCACCCTGTTCAACGAGGCCCTGCACAGAGACCTGGCCGACTTCAGAATCCAGC |
| | | ACCCCGACCTGATCCTGCTGCAGTACGTGGACGACCTGCTGCTGGCCGCCACCAGCGAG |
| | | CTGGACTGCCAGCAGGGCACCAGAGCCCTGCTGCAGACCCTGGGCAACCTGGGCTACAG |
| | | AGCCAGCGCCAAGAAGGCCCAGATCTGCCAGAAGCAGGTGAAGTACCTGGGCTACCTGC |
| | | TGAAGGAGGGCCAGAGATGGCTGACCGAGGCCAGAAAGGAGACCGTGATGGGCCAGCCC |
| | | ACCCCCAAGACCCCCAGACAGCTGAGAGAGTTCCTGGGCAAGGCCGGCTTCTGCAGACT |
| | | GTTCATCCCCGGCTTCGCCGAGATGGCCGCCCCCCTGTACCCCCTGACCAAGCCCGGCA |
| | | CCCTGTTCAACTGGGGCCCCGACCAGCAGAAGGCCTACCAGGAGATCAAGCAGGCCCTG |
| | | CTGACCGCCCCCGCCCTGGGCCTGCCCGACCTGACCAAGCCCTTCGAGCTGTTCGTGGA |
| | | CGAGAAGCAGGGCTACGCCAAGGGCGTGCTGACCCAGAAGCTGGGCCCCTGGAGAAGAC |
| | | CCGTGGCCTACCTGAGCAAGAAGCTGGACCCCGTGGCCGCCGGCTGGCCCCCCTGCCTG |
| | | AGAATGGTGGCCGCCATCGCCGTGCTGACCAAGGACGCCGGCAAGCTGACCATGGGCCA |
| | | GCCCCTGGTGATCCTGGCCCCCCACGCCGTGGAGGCCCTGGTGAAGCAGCCCCCCGACA |
| | | GATGGCTGAGCAACGCCAGAATGACCCACTACCAGGCCCTGCTGCTGGACACCGACAGA |
| | | GTGCAGTTCGGCCCCGTGGTGGCCCTGAACCCCGCCACCCTGCTGCCCCTGCCCGAGGA |
| | | GGGCCTGCAGCACAACTGCCTGGACATCCTGGCCGAGGCCCACGGCACCAGACCCGACC |
| | | TGACCGACCAGCCCCTGCCCGACGCCGACCACACCTGGTACACCGACGGCAGCAGCCTG |
| | | CTGCAGGAGGGCCAGAGAAAGGCCGGCGCCGCCGTGACCACCGAGACCGAGGTGATCTG |
| | | GGCCAAGGCCCTGCCCGCCGGCACCAGCGCCCAGAGAGCCGAGCTGATCGCCCTGACCC |
| | | AGGCCCTGAAGATGGCCGAGGGCAAGAAGCTGAACGTGTACACCGACAGCAGATACGCC |
| | | TTCGCCACCGCCCACATCCACGGCGAGATCTACAGAAGAAGAGGCTGGCTGACCAGCGA |
| | | GGGCAAGGAGATCAAGAACAAGGACGAGATCCTGGCCCTGCTGAAGGCCCTGTTCCTGC |
| | | CCAAGAGACTGAGCATCATCCACTGCCCCGGCCACCAGAAGGGCCACAGCGCCGAGGCC |
| | | AGAGGCAACAGAATGGCCGACCAGGCCGCCAGAAAGGCCGCCATCACCGAGACCCCCGA |
| | | CACCAGCACCCTGCTGATCGAGAACAGCAGCCCCAGCGGCGGCAGCAAGAGAACCGCCG |
| | | ACGGCAGCGAGTTCGAGCCCAAGAAGAAGAGAAAGGTGGGCAGCGGCAAGGACAAGAAA |
| | | TCCGATGGCAAGGACAGCCAGAAAAAATGA |
| 647 | PL1926 | AAAAAAAAAAAAAAAAAAAAAAAAAAAAAAAAAAAAAAAAAAtgaagagcaggcctgca |
| | | tgcaagcttctagcataaccccttggggcctctaaacgggtcttgaggggttttttggg |
| | | tgtaatcatggtcatagctgtttcctgtgtgaacagcctggggctcaccttcggggggc |
| | | ctttctgcgggtgcctaatgagtgagctaactcacattaattgcgttgcgctcactgcc |
| | | cgctttccagtcgggaaacctgtcgtgccagctgcattaatgaatcggccaacgcgcgg |
| | | ggagaggcggtttgcgtattgggcgccgaagaaaggcccacccgtgaaggtgagcctct |
| | | tccgcttcctcgctcactgactcgctgcgctcggtcgttcggctgcggcgagcggtatc |
| | | agctcactcaaaggcggtaatacggttatccacagaatcaggggataacgcaggaaaga |
| | | acatgtgagcaaaaggccagcaaaaggccaggaaccgtaaaaaggccgcgttgctggcg |
| | | tttttccataggctccgcccccctgacgagcatcacaaaaatcgacgctcaagtcagag |
| | | gtggcgaaacccgacaggactataaagataccaggcgtttccccctggaagctccctcg |
| | | tgcgctctcctgttccgaccctgccgcttaccggatacctgtccgcctttctcccttcg |
| | | ggaagcgtggcgctttctcatagctcacgctgtaggtatctcagttcggtgtaggtcgt |
| | | tcgctccaagctgggctgtgtgcacgaaccccccgttcagcccgaccgctgcgccttat |
| | | ccggtaactatcgtcttgagtccaacccggtaagacacgacttatcgccactggcagca |
| | | gccactggtaacaggattagcagagcgaggtatgtaggcggtgctacagagttcttgaa |
| | | gtggtggcctaactacggctacactagaagaacagtatttggtatctgcgctctgctga |
| | | agccagttaccttcggaaaaagagttggtagctcttgatccggcaaacaaaccaccgct |
| | | ggtagcggtggtttttttgtttgcaagcagcagattacgcgcagaaaaaaaggatctca |
| | | agaagatcctttgatcttttctacggggtctgacgctcagtggaacgaaaactcacgtt |
| | | aagggattttggtcatgagattatcaaaaaggatcttcacctagatccttttaaattaa |
| | | aaatgaagttttaaatcaagcccaatctgaataatgttacaaccaattaaccaattctg |
| | | attagaaaaactcatcgagcatcaaatgaaactgcaatttattcatatcaggattatca |
| | | ataccatatttttgaaaaagccgtttctgtaatgaaggagaaaactcaccgaggcagtt |
| | | ccataggatggcaagatcctggtatcggtctgcgattccgactcgtccaacatcaatac |
| | | aacctattaatttcccctcgtcaaaaataaggttatcaagtgagaaatcaccatgagtg |
| | | acgactgaatccggtgagaatggcaaaagtttatgcatttctttccagacttgttcaac |
| | | aggccagccattacgctcgtcatcaaaatcactcgcatcaaccaaaccgttattcattc |
| | | gtgattgcgcctgagcgagacgaaatacgcgatcgctgttaaaaggacaattacaaaca |
| | | ggaatcgaatgcaaccggcgcaggaacactgccagcgcatcaacaatattttcacctga |
| | | atcaggatattcttctaatacctggaatgctgtttttccggggatcgcagtggtgagta |
| | | accatgcatcatcaggagtacggataaaatgcttgatggtcggaagaggcataaattcc |
| | | gtcagccagtttagtctgaccatctcatctgtaacatcattggcaacgctacctttgcc |
| | | atgtttcagaaacaactctggcgcatcgggcttcccatacaagcgatagattgtcgcac |
| | | ctgattgcccgacattatcgcgagcccatttatacccatataaatcagcatccatgttg |
| | | gaatttaatcgcggcctcgacgtttcccgttgaatatggctcataacaccccttgtatt |
| | | actgtttatgtaagcagacagttttattgttcatgatgatatatttttatcttgtgcaa |
| | | tgtaacatcagagattttgagacacgggccagagctgcatcgcgcgtttcggtgatgac |
| | | ggtgaaaacctctgacacatgcagctcccggagacggtcacagcttgtctgtaagcgga |
| | | tgccgggagcagacaagcccgtcagggcgcgtcagcgggtgttggcgggtgtcggggct |
| | | ggcttaactatgcggcatcagagcagattgtactgagagtgcaccatatgcggtgtgaa |
| | | ataccgcacagatgcgtaaggagaaaataccgcatcaggcgccattcgccattcaggct |
| | | gcgcaactgttgggaagggcgatcggtgcgggcctcttcgctattacgccagctggcga |
| | | aagggggatgtgctgcaaggcgattaagttgggtaacgccagggttttcccagtcacga |
| | | cgttgtaaaacgacggccagagaattcgagctcggtaccTAATACGACTCACTATAaGG |
| | | AAGCTCAGAATAAACGCTCAACTTTGGCCGGATCTGCCACCATGAAGAGAACCGCCGAC |
| | | GGCAGCGAGTTCGAGAGCCCCAAGAAGAAGAGAAAGGTGCTGAACATCGAGGACGAGTA |
| | | CAGACTGCACGAGACCAGCAAGGAGCCCGACGTGAGCCTGGGCAGCACCTGGCTGAGCG |
| | | ACTTCCCCCAGGCCTGGGCCGAGACCGGCGGCATGGGCCTGGCCGTGAGACAGGCCCCC |
| | | CTGATCATCCCCCTGAAGGCCACCAGCACCCCCGTGAGCATCAAGCAGTACCCCATGAG |
| | | CCAGGAGGCCAGACTGGGCATCAAGCCCCACATCCAGAGACTGCTGGACCAGGGCATCC |
| | | TGGTGCCCTGCCAGAGCCCCTGGAACACCCCCCTGCTGCCCGTGAAGAAGCCCGGCACC |
| | | AACGACTACAGACCCGTGCAGGACCTGAGAGAGGTGAACAAGAGAGTGGAGGACATCCA |
| | | CCCCACCGTGCCCAACCCCTACAACCTGCTGAGCGGCCTGCCCCCCAGCCACCAGTGGT |
| | | ACACCGTGCTGGACCTGAAGGACGCCTTCTTCTGCCTGAGACTGCACCCCACCAGCCAG |
| | | CCCCTGTTCGCCTTCGAGTGGAGAGACCCCGAGATGGGCATCAGCGGCCAGCTGACCTG |
| | | GACCAGACTGCCCCAGGGCTTCAAGAACAGCCCCACCCTGTTCAACGAGGCCCTGCACA |
| | | GAGACCTGGCCGACTTCAGAATCCAGCACCCCGACCTGATCCTGCTGCAGTACGTGGAC |
| | | GACCTGCTGCTGGCCGCCACCAGCGAGCTGGACTGCCAGCAGGGCACCAGAGCCCTGCT |
| | | GCAGACCCTGGGCAACCTGGGCTACAGAGCCAGCGCCAAGAAGGCCCAGATCTGCCAGA |
| | | AGCAGGTGAAGTACCTGGGCTACCTGCTGAAGGAGGGCCAGAGATGGCTGACCGAGGCC |
| | | AGAAAGGAGACCGTGATGGGCCAGCCCACCCCCAAGACCCCCAGACAGCTGAGAGAGTT |
| | | CCTGGGCAAGGCCGGCTTCTGCAGACTGTTCATCCCCGGCTTCGCCGAGATGGCCGCCC |
| | | CCCTGTACCCCCTGACCAAGCCCGGCACCCTGTTCAACTGGGGCCCCGACCAGCAGAAG |
| | | GCCTACCAGGAGATCAAGCAGGCCCTGCTGACCGCCCCCGCCCTGGGCCTGCCCGACCT |
| | | GACCAAGCCCTTCGAGCTGTTCGTGGACGAGAAGCAGGGCTACGCCAAGGGCGTGCTGA |
| | | CCCAGAAGCTGGGCCCCTGGAGAAGACCCGTGGCCTACCTGAGCAAGAAGCTGGACCCC |
| | | GTGGCCGCCGGCTGGCCCCCCTGCCTGAGAATGGTGGCCGCCATCGCCGTGCTGACCAA |
| | | GGACGCCGGCAAGCTGACCATGGGCCAGCCCCTGGTGATCCTGGCCCCCCACGCCGTGG |
| | | AGGCCCTGGTGAAGCAGCCCCCCGACAGATGGCTGAGCAACGCCAGAATGACCCACTAC |
| | | CAGGCCCTGCTGCTGGACACCGACAGAGTGCAGTTCGGCCCCGTGGTGGCCCTGAACCC |
| | | CGCCACCCTGCTGCCCCTGCCCGAGGAGGGCCTGCAGCACAACTGCCTGGACATCCTGG |
| | | CCGAGGCCCACGGCACCAGACCCGACCTGACCGACCAGCCCCTGCCCGACGCCGACCAC |
| | | ACCTGGTACACCGACGGCAGCAGCCTGCTGCAGGAGGGCCAGAGAAAGGCCGGCGCCGC |
| | | CGTGACCACCGAGACCGAGGTGATCTGGGCCAAGGCCCTGCCCGCCGGCACCAGCGCCC |
| | | AGAGAGCCGAGCTGATCGCCCTGACCCAGGCCCTGAAGATGGCCGAGGGCAAGAAGCTG |
| | | AACGTGTACACCGACAGCAGATACGCCTTCGCCACCGCCCACATCCACGGCGAGATCTA |
| | | CAGAAGAAGAGGCTGGCTGACCAGCGAGGGCAAGGAGATCAAGAACAAGGACGAGATCC |
| | | TGGCCCTGCTGAAGGCCCTGTTCCTGCCCAAGAGACTGAGCATCATCCACTGCCCCGGC |
| | | CACCAGAAGGGCCACAGCGCCGAGGCCAGAGGCAACAGAATGGCCGACCAGGCCGCCAG |
| | | AAAGGCCGCCATCACCGAGACCCCCGACACCAGCACCCTGCTGATCGAGAACAGCAGCC |
| | | CCAGCGGCGGCAGCAAGAGAACCGCCGACGGCAGCGAGTTCGAGCCCAAGAAGAAGAGA |
| | | AAGGTGGGCAGCGGCAAGGACAAGAAATCCGATGGCAAGGACAGCCAGAAAAAATAGTG |
| | | Aacatggggggtctgcggacggcttcggcccacccgcgacaagaatgccgtcatctgtc |
| | | ctcattacccgtattccttcccttcccccgcaaccaccacgcttactcgcgcacgtgtt |
| | | gagtggcacgtgcgttgtccaaacagctacacccacacccttcggggcgggtttgtccc |
| | | gccctcgggttcctcgcggaacccccccctccctctctctctttctatccgccctcact |
| | | tcccataactacagtgctttggtaggtgagcaccctgaccccccgcggaagctgctaac |
| | | gtggcaactgtggggatccaggcaggttatcaaaggcacccggtctttccgccttcagg |
| | | agtatctctgccggtgaattccggtagggctctgcttggtgccaacctcccccaaatgc |
| | | gcgctgcgggagtgcActtccccaactcatcttagtaacctctcatgtgtgtgcttggt |
| | | cagcatatctgaggcgacgttccgctgtcccagaccagtccagcaatggacgggccagt |
| | | gtgcgtagtcgctttccggttttccggcgcatgtttggcgaaacgctgaggtaaggttg |
| | | gtgtgcccaacgcccgtaatttggtgatacctcaagaccacccaggaatgccagggagg |
| | | taccccacttcggtgggatctgaccctgggctaattgtctacggtggttcttcttgctt |
| | | ccacttctcttttttctggcatgAAGAGAACCGCCGACGGCAGCGAGTTCGAGAGCCCC |
| | | AAGAAGAAGAGAAAGGTGGACAAGAAGTACAGCATCGGCCTGGACATCGGCACCAACAG |
| | | CGTGGGCTGGGCCGTGATCACCGACGAGTACAAGGTGCCCAGCAAGAAGTTCAAGGTGC |
| | | TGGGCAACACCGACAGACACAGCATCAAGAAGAACCTGATCGGCGCCCTGCTGTTCGAC |
| | | AGCGGCGAGACCGCCGAGGCCACCAGACTGAAGAGAACCGCCAGAAGAAGATACACCAG |
| | | AAGAAAGAACAGAATCTGCTACCTGCAGGAGATCTTCAGCAACGAGATGGCCAAGGTGG |
| | | ACGACAGCTTCTTCCACAGACTGGAGGAGAGCTTCCTGGTGGAGGAGGACAAGAAGCAC |
| | | GAGAGACACCCCATCTTCGGCAACATCGTGGACGAGGTGGCCTACCACGAGAAGTACCC |
| | | CACCATCTACCACCTGAGAAAGAAGCTGGTGGACAGCACCGACAAGGCCGACCTGAGAC |
| | | TGATCTACCTGGCCCTGGCCCACATGATCAAGTTCAGAGGCCACTTCCTGATCGAGGGC |
| | | GACCTGAACCCCGACAACAGCGACGTGGACAAGCTGTTCATCCAGCTGGTGCAGACCTA |
| | | CAACCAGCTGTTCGAGGAGAACCCCATCAACGCCAGCGGCGTGGACGCCAAGGCCATCC |
| | | TGAGCGCCAGACTGAGCAAGAGCAGAAGACTGGAGAACCTGATCGCCCAGCTGCCCGGC |
| | | GAGAAGAAGAACGGCCTGTTCGGCAACCTGATCGCCCTGAGCCTGGGCCTGACCCCCAA |
| | | CTTCAAGAGCAACTTCGACCTGGCCGAGGACGCCAAGCTGCAGCTGAGCAAGGACACCT |
| | | ACGACGACGACCTGGACAACCTGCTGGCCCAGATCGGCGACCAGTACGCCGACCTGTTC |
| | | CTGGCCGCCAAGAACCTGAGCGACGCCATCCTGCTGAGCGACATCCTGAGAGTGAACAC |
| | | CGAGATCACCAAGGCCCCCCTGAGCGCCAGCATGATCAAGAGATACGACGAGCACCACC |
| | | AGGACCTGACCCTGCTGAAGGCCCTGGTGAGACAGCAGCTGCCCGAGAAGTACAAGGAG |
| | | ATCTTCTTCGACCAGAGCAAGAACGGCTACGCCGGCTACATCGACGGCGGCGCCAGCCA |
| | | GGAGGAGTTCTACAAGTTCATCAAGCCCATCCTGGAGAAGATGGACGGCACCGAGGAGC |
| | | TGCTGGTGAAGCTGAACAGAGAGGACCTGCTGAGAAAGCAGAGAACCTTCGACAACGGC |
| | | AGCATCCCCCACCAGATCCACCTGGGCGAGCTGCACGCCATCCTGAGAAGACAGGAGGA |
| | | CTTCTACCCCTTCCTGAAGGACAACAGAGAGAAGATCGAGAAGATCCTGACCTTCAGAA |
| | | TCCCCTACTACGTGGGCCCCCTGGCCAGAGGCAACAGCAGATTCGCCTGGATGACCAGA |
| | | AAGAGCGAGGAGACCATCACCCCCTGGAACTTCGAGGAGGTGGTGGACAAGGGCGCCAG |
| | | CGCCCAGAGCTTCATCGAGAGAATGACCAACTTCGACAAGAACCTGCCCAACGAGAAGG |
| | | TGCTGCCCAAGCACAGCCTGCTGTACGAGTACTTCACCGTGTACAACGAGCTGACCAAG |
| | | GTGAAGTACGTGACCGAGGGCATGAGAAAGCCCGCCTTCCTGAGCGGCGAGCAGAAGAA |
| | | GGCCATCGTGGACCTGCTGTTCAAGACCAACAGAAAGGTGACCGTGAAGCAGCTGAAGG |
| | | AGGACTACTTCAAGAAGATCGAGTGCTTCGACAGCGTGGAGATCAGCGGCGTGGAGGAC |
| | | AGATTCAACGCCAGCCTGGGCACCTACCACGACCTGCTGAAGATCATCAAGGACAAGGA |
| | | CTTCCTGGACAACGAGGAGAACGAGGACATCCTGGAGGACATCGTGCTGACCCTGACCC |
| | | TGTTCGAGGACAGAGAGATGATCGAGGAGAGACTGAAGACCTACGCCCACCTGTTCGAC |
| | | GACAAGGTGATGAAGCAGCTGAAGAGAAGAAGATACACCGGCTGGGGCAGACTGAGCAG |
| | | AAAGCTGATCAACGGCATCAGAGACAAGCAGAGCGGCAAGACCATCCTGGACTTCCTGA |
| | | AGAGTGACGGCTTCGCCAACAGAAACTTCATGCAGCTGATCCACGACGACAGCCTGACC |
| | | TTCAAGGAGGACATCCAGAAGGCCCAGGTGAGCGGCCAGGGCGACAGCCTGCACGAGCA |
| | | CATCGCCAACCTGGCCGGCAGCCCCGCCATCAAGAAGGGCATCCTGCAGACCGTGAAGG |
| | | TGGTGGACGAGCTGGTGAAGGTGATGGGCAGACACAAGCCCGAGAACATCGTGATCGAG |
| | | ATGGCCAGAGAGAACCAGACCACCCAGAAGGGCCAGAAGAACAGCAGAGAGAGAATGAA |
| | | GAGAATCGAGGAGGGCATCAAGGAGCTGGGCAGCCAGATCCTGAAGGAGCACCCCGTGG |
| | | AGAACACCCAGCTGCAGAACGAGAAGCTGTACCTGTACTACCTGCAGAACGGCAGAGAC |
| | | ATGTACGTGGACCAGGAGCTGGACATCAACAGACTGAGCGACTACGACGTGGACGCCAT |
| | | CGTGCCCCAGAGCTTCCTGAAGGACGACAGCATCGACAACAAGGTGCTGACCAGAAGCG |
| | | ACAAGAACAGAGGCAAGAGCGACAACGTGCCCAGCGAGGAGGTGGTGAAGAAGATGAAG |
| | | AACTACTGGAGACAGCTGCTGAACGCCAAGCTGATCACCCAGAGAAAGTTCGACAACCT |
| | | GACCAAGGCCGAGAGAGGCGGCCTGAGCGAGCTGGACAAGGCCGGCTTCATCAAGAGAC |
| | | AGCTGGTGGAGACCAGACAGATCACCAAGCACGTGGCCCAGATCCTGGACAGCAGAATG |
| | | AACACCAAGTACGACGAGAACGACAAGCTGATCAGAGAGGTGAAGGTGATCACCCTGAA |
| | | GAGTAAGCTGGTGAGCGACTTCAGAAAGGACTTCCAGTTCTACAAGGTGAGAGAGATCA |
| | | ACAACTACCACCACGCCCACGACGCCTACCTGAACGCCGTGGTGGGCACCGCCCTGATC |
| | | AAGAAGTACCCCAAGCTGGAGAGCGAGTTCGTGTACGGCGACTACAAGGTGTACGACGT |
| | | GAGAAAGATGATCGCCAAGAGCGAGCAGGAGATCGGCAAGGCCACCGCCAAGTACTTCT |
| | | TCTACAGCAACATCATGAACTTCTTCAAGACCGAGATCACCCTGGCCAACGGCGAGATC |
| | | AGAAAGAGACCCCTGATCGAGACCAACGGCGAGACCGGCGAGATCGTGTGGGACAAGGG |
| | | CAGAGACTTCGCCACCGTGAGAAAGGTGCTGAGCATGCCCCAGGTGAACATCGTGAAGA |
| | | AGACCGAGGTGCAGACCGGCGGCTTCAGCAAGGAGAGCATCCTGCCCAAGAGAAACAGC |
| | | GACAAGCTGATCGCCAGAAAGAAGGACTGGGACCCCAAGAAGTACGGCGGCTTCGACAG |
| | | CCCCACCGTGGCCTACAGCGTGCTGGTGGTGGCCAAGGTGGAGAAGGGCAAGAGCAAGA |
| | | AGCTGAAGAGTGTGAAGGAGCTGCTGGGCATCACCATCATGGAGAGAAGCAGCTTCGAG |
| | | AAGAACCCCATCGACTTCCTGGAGGCCAAGGGCTACAAGGAGGTGAAGAAGGACCTGAT |
| | | CATCAAGCTGCCCAAGTACAGCCTGTTCGAGCTGGAGAACGGCAGAAAGAGAATGCTGG |
| | | CCAGCGCCGGCGAGCTGCAGAAGGGCAACGAGCTGGCCCTGCCCAGCAAGTACGTGAAC |
| | | TTCCTGTACCTGGCCAGCCACTACGAGAAGCTGAAGGGCAGCCCCGAGGACAACGAGCA |
| | | GAAGCAGCTGTTCGTGGAGCAGCACAAGCACTACCTGGACGAGATCATCGAGCAGATCA |
| | | GCGAGTTCAGCAAGAGAGTGATCCTGGCCGACGCCAACCTGGACAAGGTGCTGAGCGCC |
| | | TACAACAAGCACAGAGACAAGCCCATCAGAGAGCAGGCCGAGAACATCATCCACCTGTT |
| | | CACCCTGACCAACCTGGGCGCCCCCGCCGCCTTCAAGTACTTCGACACCACCATCGACA |
| | | GAAAGAGATACACCAGCACCAAGGAGGTGCTGGACGCCACCCTGATCCACCAGAGCATC |
| | | ACCGGCCTGTACGAGACCAGAATCGACCTGAGCCAGCTGGGGGGCGACGGAGGAGGAAG |
| | | CCCGAAGAAGAAGAGAAAGGTCTAGTGAACCAGCCTCAAGAACACCCGAATGGAGTCTC |
| | | TAAGCTACATAATACCAACTTACACTTTACAAAATGTTGTCCCCCAAAATGTAGCCATT |
| | | CGTATCTGCTCCTAATAAAAAGAAAGTTTCTTCACATTCTAAAAAAAAAAAAAAAAAAA |
| | | AAAAAAAAAAAAAAAAAAA |
| 648 | PL1927 | AAAAAAAAAAAAAAAAAAAAAAAAAAAAAAAAAAAAAAAAAAAtgaagagcaggcctgc |
| | | atgcaagcttctagcataaccccttggggcctctaaacgggtcttgaggggttttttgg |
| | | gtgtaatcatggtcatagctgtttcctgtgtgaacagcctggggctcaccttcgggggg |
| | | cctttctgcgggtgcctaatgagtgagctaactcacattaattgcgttgcgctcactgc |
| | | ccgctttccagtcgggaaacctgtcgtgccagctgcattaatgaatcggccaacgcgcg |
| | | gggagaggcggtttgcgtattgggcgccgaagaaaggcccacccgtgaaggtgagcctc |
| | | ttccgcttcctcgctcactgactcgctgcgctcggtcgttcggctgcggcgagcggtat |
| | | cagctcactcaaaggcggtaatacggttatccacagaatcaggggataacgcaggaaag |
| | | aacatgtgagcaaaaggccagcaaaaggccaggaaccgtaaaaaggccgcgttgctggc |
| | | gtttttccataggctccgcccccctgacgagcatcacaaaaatcgacgctcaagtcaga |
| | | ggtggcgaaacccgacaggactataaagataccaggcgtttccccctggaagctccctc |
| | | gtgcgctctcctgttccgaccctgccgcttaccggatacctgtccgcctttctcccttc |
| | | gggaagcgtggcgctttctcatagctcacgctgtaggtatctcagttcggtgtaggtcg |
| | | ttcgctccaagctgggctgtgtgcacgaaccccccgttcagcccgaccgctgcgcctta |
| | | tccggtaactatcgtcttgagtccaacccggtaagacacgacttatcgccactggcagc |
| | | agccactggtaacaggattagcagagcgaggtatgtaggcggtgctacagagttcttga |
| | | agtggtggcctaactacggctacactagaagaacagtatttggtatctgcgctctgctg |
| | | aagccagttaccttcggaaaaagagttggtagctcttgatccggcaaacaaaccaccgc |
| | | tggtagcggtggtttttttgtttgcaagcagcagattacgcgcagaaaaaaaggatctc |
| | | aagaagatcctttgatcttttctacggggtctgacgctcagtggaacgaaaactcacgt |
| | | taagggattttggtcatgagattatcaaaaaggatcttcacctagatccttttaaatta |
| | | aaaatgaagttttaaatcaagcccaatctgaataatgttacaaccaattaaccaattct |
| | | gattagaaaaactcatcgagcatcaaatgaaactgcaatttattcatatcaggattatc |
| | | aataccatatttttgaaaaagccgtttctgtaatgaaggagaaaactcaccgaggcagt |
| | | tccataggatggcaagatcctggtatcggtctgcgattccgactcgtccaacatcaata |
| | | caacctattaatttcccctcgtcaaaaataaggttatcaagtgagaaatcaccatgagt |
| | | gacgactgaatccggtgagaatggcaaaagtttatgcatttctttccagacttgttcaa |
| | | caggccagccattacgctcgtcatcaaaatcactcgcatcaaccaaaccgttattcatt |
| | | cgtgattgcgcctgagcgagacgaaatacgcgatcgctgttaaaaggacaattacaaac |
| | | aggaatcgaatgcaaccggcgcaggaacactgccagcgcatcaacaatattttcacctg |
| | | aatcaggatattcttctaatacctggaatgctgtttttccggggatcgcagtggtgagt |
| | | aaccatgcatcatcaggagtacggataaaatgcttgatggtcggaagaggcataaattc |
| | | cgtcagccagtttagtctgaccatctcatctgtaacatcattggcaacgctacctttgc |
| | | catgtttcagaaacaactctggcgcatcgggcttcccatacaagcgatagattgtcgca |
| | | cctgattgcccgacattatcgcgagcccatttatacccatataaatcagcatccatgtt |
| | | ggaatttaatcgcggcctcgacgtttcccgttgaatatggctcataacaccccttgtat |
| | | tactgtttatgtaagcagacagttttattgttcatgatgatatatttttatcttgtgca |
| | | atgtaacatcagagattttgagacacgggccagagctgcatcgcgcgtttcggtgatga |
| | | cggtgaaaacctctgacacatgcagctcccggagacggtcacagcttgtctgtaagcgg |
| | | atgccgggagcagacaagcccgtcagggcgcgtcagcgggtgttggcgggtgtcggggc |
| | | tggcttaactatgcggcatcagagcagattgtactgagagtgcaccatatgcggtgtga |
| | | aataccgcacagatgcgtaaggagaaaataccgcatcaggcgccattcgccattcaggc |
| | | tgcgcaactgttgggaagggcgatcggtgcgggcctcttcgctattacgccagctggcg |
| | | aaagggggatgtgctgcaaggcgattaagttgggtaacgccagggttttcccagtcacg |
| | | acgttgtaaaacgacggccagagaattcgagctcggtaccTAATACGACTCACTATAaG |
| | | GAAGCTCAGAATAAACGCTCAACTTTGGCCGGATCTGCCACCATGAAGAGAACCGCCGA |
| | | CGGCAGCGAGTTCGAGAGCCCCAAGAAGAAGAGAAAGGTGCTGAACATCGAGGACGAGT |
| | | ACAGACTGCACGAGACCAGCAAGGAGCCCGACGTGAGCCTGGGCAGCACCTGGCTGAGC |
| | | GACTTCCCCCAGGCCTGGGCCGAGACCGGCGGCATGGGCCTGGCCGTGAGACAGGCCCC |
| | | CCTGATCATCCCCCTGAAGGCCACCAGCACCCCCGTGAGCATCAAGCAGTACCCCATGA |
| | | GCCAGGAGGCCAGACTGGGCATCAAGCCCCACATCCAGAGACTGCTGGACCAGGGCATC |
| | | CTGGTGCCCTGCCAGAGCCCCTGGAACACCCCCCTGCTGCCCGTGAAGAAGCCCGGCAC |
| | | CAACGACTACAGACCCGTGCAGGACCTGAGAGAGGTGAACAAGAGAGTGGAGGACATCC |
| | | ACCCCACCGTGCCCAACCCCTACAACCTGCTGAGCGGCCTGCCCCCCAGCCACCAGTGG |
| | | TACACCGTGCTGGACCTGAAGGACGCCTTCTTCTGCCTGAGACTGCACCCCACCAGCCA |
| | | GCCCCTGTTCGCCTTCGAGTGGAGAGACCCCGAGATGGGCATCAGCGGCCAGCTGACCT |
| | | GGACCAGACTGCCCCAGGGCTTCAAGAACAGCCCCACCCTGTTCAACGAGGCCCTGCAC |
| | | AGAGACCTGGCCGACTTCAGAATCCAGCACCCCGACCTGATCCTGCTGCAGTACGTGGA |
| | | CGACCTGCTGCTGGCCGCCACCAGCGAGCTGGACTGCCAGCAGGGCACCAGAGCCCTGC |
| | | TGCAGACCCTGGGCAACCTGGGCTACAGAGCCAGCGCCAAGAAGGCCCAGATCTGCCAG |
| | | AAGCAGGTGAAGTACCTGGGCTACCTGCTGAAGGAGGGCCAGAGATGGCTGACCGAGGC |
| | | CAGAAAGGAGACCGTGATGGGCCAGCCCACCCCCAAGACCCCCAGACAGCTGAGAGAGT |
| | | TCCTGGGCAAGGCCGGCTTCTGCAGACTGTTCATCCCCGGCTTCGCCGAGATGGCCGCC |
| | | CCCCTGTACCCCCTGACCAAGCCCGGCACCCTGTTCAACTGGGGCCCCGACCAGCAGAA |
| | | GGCCTACCAGGAGATCAAGCAGGCCCTGCTGACCGCCCCCGCCCTGGGCCTGCCCGACC |
| | | TGACCAAGCCCTTCGAGCTGTTCGTGGACGAGAAGCAGGGCTACGCCAAGGGCGTGCTG |
| | | ACCCAGAAGCTGGGCCCCTGGAGAAGACCCGTGGCCTACCTGAGCAAGAAGCTGGACCC |
| | | CGTGGCCGCCGGCTGGCCCCCCTGCCTGAGAATGGTGGCCGCCATCGCCGTGCTGACCA |
| | | AGGACGCCGGCAAGCTGACCATGGGCCAGCCCCTGGTGATCCTGGCCCCCCACGCCGTG |
| | | GAGGCCCTGGTGAAGCAGCCCCCCGACAGATGGCTGAGCAACGCCAGAATGACCCACTA |
| | | CCAGGCCCTGCTGCTGGACACCGACAGAGTGCAGTTCGGCCCCGTGGTGGCCCTGAACC |
| | | CCGCCACCCTGCTGCCCCTGCCCGAGGAGGGCCTGCAGCACAACTGCCTGGACATCCTG |
| | | GCCGAGGCCCACGGCACCAGACCCGACCTGACCGACCAGCCCCTGCCCGACGCCGACCA |
| | | CACCTGGTACACCGACGGCAGCAGCCTGCTGCAGGAGGGCCAGAGAAAGGCCGGCGCCG |
| | | CCGTGACCACCGAGACCGAGGTGATCTGGGCCAAGGCCCTGCCCGCCGGCACCAGCGCC |
| | | CAGAGAGCCGAGCTGATCGCCCTGACCCAGGCCCTGAAGATGGCCGAGGGCAAGAAGCT |
| | | GAACGTGTACACCGACAGCAGATACGCCTTCGCCACCGCCCACATCCACGGCGAGATCT |
| | | ACAGAAGAAGAGGCTGGCTGACCAGCGAGGGCAAGGAGATCAAGAACAAGGACGAGATC |
| | | CTGGCCCTGCTGAAGGCCCTGTTCCTGCCCAAGAGACTGAGCATCATCCACTGCCCCGG |
| | | CCACCAGAAGGGCCACAGCGCCGAGGCCAGAGGCAACAGAATGGCCGACCAGGCCGCCA |
| | | GAAAGGCCGCCATCACCGAGACCCCCGACACCAGCACCCTGCTGATCGAGAACAGCAGC |
| | | CCCAGCGGCGGCAGCAAGAGAACCGCCGACGGCAGCGAGTTCGAGCCCAAGAAGAAGAG |
| | | AAAGGTGGGCAGCGGCAAGGACAAGAAATCCGATGGCAAGGACAGCCAGAAAAAATAGT |
| | | GAACCTAGGCGTAGCGGCCGCAAATTCCGCCCCTCTCCCTCCCCCCCCCCTAACGTTAC |
| | | TGGCCGAAGCCGCTTGGAATAAGGCCGGTGTGCGTTTGTCTATATGTTATTTTCCACCA |
| | | TATTGCCGTCTTTTGGCAATGTGAGGGCCCGGAAACCTGGCCCTGTCTTCTTGACGAGC |
| | | ATTCCTAGGGGTCTTTCCCCTCTCGCCAAAGGAATGCAAGGTCTGTTGAATGTCGTGAA |
| | | GGAAGCAGTTCCTCTGGAAGCTTCTTGAAGACAAACAACGTCTGTAGCGACCCTTTGCA |
| | | GGCAGCGGAACCCCCCACCTGGCGACAGGTGCCTCTGCGGCCAAAAGCCACGTGTATAA |
| | | GATACACCTGCAAAGGCGGCACAACCCCAGTGCCACGTTGTGAGTTGGATAGTTGTGGA |
| | | AAGAGTCAAATGGCTCTCCTCAAGCGTATTCAACAAGGGGCTGAAGGATGCCCAGAAGG |
| | | TACCCCATTGTATGGGATCTGATCTGGGGCCTCGGTGCACATGCTTTACATGTGTTTAG |
| | | TCGAGGTTAAAAAAACGTCTAGGCCCCCCGAACCACGGGGACGTGGTTTTCCTTTGAAA |
| | | AACACGATGATAATATGAAGAGAACCGCCGACGGCAGCGAGTTCGAGAGCCCCAAGAAG |
| | | AAGAGAAAGGTGGACAAGAAGTACAGCATCGGCCTGGACATCGGCACCAACAGCGTGGG |
| | | CTGGGCCGTGATCACCGACGAGTACAAGGTGCCCAGCAAGAAGTTCAAGGTGCTGGGCA |
| | | ACACCGACAGACACAGCATCAAGAAGAACCTGATCGGCGCCCTGCTGTTCGACAGCGGC |
| | | GAGACCGCCGAGGCCACCAGACTGAAGAGAACCGCCAGAAGAAGATACACCAGAAGAAA |
| | | GAACAGAATCTGCTACCTGCAGGAGATCTTCAGCAACGAGATGGCCAAGGTGGACGACA |
| | | GCTTCTTCCACAGACTGGAGGAGAGCTTCCTGGTGGAGGAGGACAAGAAGCACGAGAGA |
| | | CACCCCATCTTCGGCAACATCGTGGACGAGGTGGCCTACCACGAGAAGTACCCCACCAT |
| | | CTACCACCTGAGAAAGAAGCTGGTGGACAGCACCGACAAGGCCGACCTGAGACTGATCT |
| | | ACCTGGCCCTGGCCCACATGATCAAGTTCAGAGGCCACTTCCTGATCGAGGGCGACCTG |
| | | AACCCCGACAACAGCGACGTGGACAAGCTGTTCATCCAGCTGGTGCAGACCTACAACCA |
| | | GCTGTTCGAGGAGAACCCCATCAACGCCAGCGGCGTGGACGCCAAGGCCATCCTGAGCG |
| | | CCAGACTGAGCAAGAGCAGAAGACTGGAGAACCTGATCGCCCAGCTGCCCGGCGAGAAG |
| | | AAGAACGGCCTGTTCGGCAACCTGATCGCCCTGAGCCTGGGCCTGACCCCCAACTTCAA |
| | | GAGCAACTTCGACCTGGCCGAGGACGCCAAGCTGCAGCTGAGCAAGGACACCTACGACG |
| | | ACGACCTGGACAACCTGCTGGCCCAGATCGGCGACCAGTACGCCGACCTGTTCCTGGCC |
| | | GCCAAGAACCTGAGCGACGCCATCCTGCTGAGCGACATCCTGAGAGTGAACACCGAGAT |
| | | CACCAAGGCCCCCCTGAGCGCCAGCATGATCAAGAGATACGACGAGCACCACCAGGACC |
| | | TGACCCTGCTGAAGGCCCTGGTGAGACAGCAGCTGCCCGAGAAGTACAAGGAGATCTTC |
| | | TTCGACCAGAGCAAGAACGGCTACGCCGGCTACATCGACGGCGGCGCCAGCCAGGAGGA |
| | | GTTCTACAAGTTCATCAAGCCCATCCTGGAGAAGATGGACGGCACCGAGGAGCTGCTGG |
| | | TGAAGCTGAACAGAGAGGACCTGCTGAGAAAGCAGAGAACCTTCGACAACGGCAGCATC |
| | | CCCCACCAGATCCACCTGGGCGAGCTGCACGCCATCCTGAGAAGACAGGAGGACTTCTA |
| | | CCCCTTCCTGAAGGACAACAGAGAGAAGATCGAGAAGATCCTGACCTTCAGAATCCCCT |
| | | ACTACGTGGGCCCCCTGGCCAGAGGCAACAGCAGATTCGCCTGGATGACCAGAAAGAGC |
| | | GAGGAGACCATCACCCCCTGGAACTTCGAGGAGGTGGTGGACAAGGGCGCCAGCGCCCA |
| | | GAGCTTCATCGAGAGAATGACCAACTTCGACAAGAACCTGCCCAACGAGAAGGTGCTGC |
| | | CCAAGCACAGCCTGCTGTACGAGTACTTCACCGTGTACAACGAGCTGACCAAGGTGAAG |
| | | TACGTGACCGAGGGCATGAGAAAGCCCGCCTTCCTGAGCGGCGAGCAGAAGAAGGCCAT |
| | | CGTGGACCTGCTGTTCAAGACCAACAGAAAGGTGACCGTGAAGCAGCTGAAGGAGGACT |
| | | ACTTCAAGAAGATCGAGTGCTTCGACAGCGTGGAGATCAGCGGCGTGGAGGACAGATTC |
| | | AACGCCAGCCTGGGCACCTACCACGACCTGCTGAAGATCATCAAGGACAAGGACTTCCT |
| | | GGACAACGAGGAGAACGAGGACATCCTGGAGGACATCGTGCTGACCCTGACCCTGTTCG |
| | | AGGACAGAGAGATGATCGAGGAGAGACTGAAGACCTACGCCCACCTGTTCGACGACAAG |
| | | GTGATGAAGCAGCTGAAGAGAAGAAGATACACCGGCTGGGGCAGACTGAGCAGAAAGCT |
| | | GATCAACGGCATCAGAGACAAGCAGAGCGGCAAGACCATCCTGGACTTCCTGAAGAGTG |
| | | ACGGCTTCGCCAACAGAAACTTCATGCAGCTGATCCACGACGACAGCCTGACCTTCAAG |
| | | GAGGACATCCAGAAGGCCCAGGTGAGCGGCCAGGGCGACAGCCTGCACGAGCACATCGC |
| | | CAACCTGGCCGGCAGCCCCGCCATCAAGAAGGGCATCCTGCAGACCGTGAAGGTGGTGG |
| | | ACGAGCTGGTGAAGGTGATGGGCAGACACAAGCCCGAGAACATCGTGATCGAGATGGCC |
| | | AGAGAGAACCAGACCACCCAGAAGGGCCAGAAGAACAGCAGAGAGAGAATGAAGAGAAT |
| | | CGAGGAGGGCATCAAGGAGCTGGGCAGCCAGATCCTGAAGGAGCACCCCGTGGAGAACA |
| | | CCCAGCTGCAGAACGAGAAGCTGTACCTGTACTACCTGCAGAACGGCAGAGACATGTAC |
| | | GTGGACCAGGAGCTGGACATCAACAGACTGAGCGACTACGACGTGGACGCCATCGTGCC |
| | | CCAGAGCTTCCTGAAGGACGACAGCATCGACAACAAGGTGCTGACCAGAAGCGACAAGA |
| | | ACAGAGGCAAGAGCGACAACGTGCCCAGCGAGGAGGTGGTGAAGAAGATGAAGAACTAC |
| | | TGGAGACAGCTGCTGAACGCCAAGCTGATCACCCAGAGAAAGTTCGACAACCTGACCAA |
| | | GGCCGAGAGAGGCGGCCTGAGCGAGCTGGACAAGGCCGGCTTCATCAAGAGACAGCTGG |
| | | TGGAGACCAGACAGATCACCAAGCACGTGGCCCAGATCCTGGACAGCAGAATGAACACC |
| | | AAGTACGACGAGAACGACAAGCTGATCAGAGAGGTGAAGGTGATCACCCTGAAGAGTAA |
| | | GCTGGTGAGCGACTTCAGAAAGGACTTCCAGTTCTACAAGGTGAGAGAGATCAACAACT |
| | | ACCACCACGCCCACGACGCCTACCTGAACGCCGTGGTGGGCACCGCCCTGATCAAGAAG |
| | | TACCCCAAGCTGGAGAGCGAGTTCGTGTACGGCGACTACAAGGTGTACGACGTGAGAAA |
| | | GATGATCGCCAAGAGCGAGCAGGAGATCGGCAAGGCCACCGCCAAGTACTTCTTCTACA |
| | | GCAACATCATGAACTTCTTCAAGACCGAGATCACCCTGGCCAACGGCGAGATCAGAAAG |
| | | AGACCCCTGATCGAGACCAACGGCGAGACCGGCGAGATCGTGTGGGACAAGGGCAGAGA |
| | | CTTCGCCACCGTGAGAAAGGTGCTGAGCATGCCCCAGGTGAACATCGTGAAGAAGACCG |
| | | AGGTGCAGACCGGCGGCTTCAGCAAGGAGAGCATCCTGCCCAAGAGAAACAGCGACAAG |
| | | CTGATCGCCAGAAAGAAGGACTGGGACCCCAAGAAGTACGGCGGCTTCGACAGCCCCAC |
| | | CGTGGCCTACAGCGTGCTGGTGGTGGCCAAGGTGGAGAAGGGCAAGAGCAAGAAGCTGA |
| | | AGAGTGTGAAGGAGCTGCTGGGCATCACCATCATGGAGAGAAGCAGCTTCGAGAAGAAC |
| | | CCCATCGACTTCCTGGAGGCCAAGGGCTACAAGGAGGTGAAGAAGGACCTGATCATCAA |
| | | GCTGCCCAAGTACAGCCTGTTCGAGCTGGAGAACGGCAGAAAGAGAATGCTGGCCAGCG |
| | | CCGGCGAGCTGCAGAAGGGCAACGAGCTGGCCCTGCCCAGCAAGTACGTGAACTTCCTG |
| | | TACCTGGCCAGCCACTACGAGAAGCTGAAGGGCAGCCCCGAGGACAACGAGCAGAAGCA |
| | | GCTGTTCGTGGAGCAGCACAAGCACTACCTGGACGAGATCATCGAGCAGATCAGCGAGT |
| | | TCAGCAAGAGAGTGATCCTGGCCGACGCCAACCTGGACAAGGTGCTGAGCGCCTACAAC |
| | | AAGCACAGAGACAAGCCCATCAGAGAGCAGGCCGAGAACATCATCCACCTGTTCACCCT |
| | | GACCAACCTGGGCGCCCCCGCCGCCTTCAAGTACTTCGACACCACCATCGACAGAAAGA |
| | | GATACACCAGCACCAAGGAGGTGCTGGACGCCACCCTGATCCACCAGAGCATCACCGGC |
| | | CTGTACGAGACCAGAATCGACCTGAGCCAGCTGGGCGGCGACGGAGGAGGAAGCCCGAA |
| | | GAAGAAGAGAAAGGTCTAGTGAACCAGCCTCAAGAACACCCGAATGGAGTCTCTAAGCT |
| | | ACATAATACCAACTTACACTTTACAAAATGTTGTCCCCCAAAATGTAGCCATTCGTATC |
| | | TGCTCCTAATAAAAAGAAAGTTTCTTCACATTCTAAAAAAAAAAAAAAAAAAAAAAAAA |
| | | AAAAAAAAAAAA |
| 649 | PL1948 | MPAAKRVKLDYPYDVPDYAKDKKSDGKDSQKKGSRALWIRLSRVTDATTSPERQLESCQ |
| | _AA | QLCAQRGWDVVGVAEDLDVSGAVDPFDRKRRPNLARWLAFEEQPFDVIVAYRVDRLTRS |
| | | IRHLQQLVHWAEDHKKLVVSATEAHFDTTTPFAAVVIALMGTVAQMELEAIKERNRSAA |
| | | HFNIRAGKYRGSLPPWGYLPTRVDGEWRLVPDPVQRERILEVYHRVVDNHEPLHLVAHD |
| | | LNRRGVLSPKDYFAQLQGREPQGREWSATALKRSMISEAMLGYATLNGKTVRDDDGAPL |
| | | VRAEPILTREQLEALRAELVKTSRAKPAVSTPSLLLRVLFCAVCGEPAYKFAGGGRKHP |
| | | RYRCRSMGFPKHCGNGTVAMAEWDAFCEEQVLDLLGDAERLEKVWVAGSDSAVELAEVN |
| | | AELVDLTSLIGSPAYRAGSPQREALDARIAALAARQEELEGLEARPSGWEWRETGQRFG |
| | | DWWREQDTAAKNTWLRSMNVRLTFDVRGGLTRTIDFGDLQEYEQHLRLGSVVERLHTGM |
| | | SGSGPKKKRKV* |
| 650 | PL1948_ | ATGcctgctgctaagagagtgaaactggatTACCCCTACGACGTGCCCGACTACGCCAA |
| | DNA | GGACAAGAAATCCGATGGCAAGGACAGCCAGAAAAAAGGCAGCAGAGCCCTGGTGGTGA |
| | | TCAGACTGAGCAGAGTGACCGACGCCACCACCAGCCCCGAGAGACAGCTGGAGAGCTGC |
| | | CAGCAGCTGTGCGCCCAGAGAGGCTGGGACGTGGTGGGCGTGGCCGAGGACCTGGACGT |
| | | GAGCGGCGCCGTGGACCCCTTCGACAGAAAGAGAAGACCCAACCTGGCCAGATGGCTGG |
| | | CCTTCGAGGAGCAGCCCTTCGACGTGATCGTGGCCTACAGAGTGGACAGACTGACCAGA |
| | | AGCATCAGACACCTGCAGCAGCTGGTGCACTGGGCCGAGGACCACAAGAAGCTGGTGGT |
| | | GAGCGCCACCGAGGCCCACTTCGACACCACCACCCCCTTCGCCGCCGTGGTGATCGCCC |
| | | TGATGGGCACCGTGGCCCAGATGGAGCTGGAGGCCATCAAGGAGAGAAACAGAAGCGCC |
| | | GCCCACTTCAACATCAGAGCCGGCAAGTACAGAGGCAGCCTGCCCCCCTGGGGCTACCT |
| | | GCCCACCAGAGTGGACGGCGAGTGGAGACTGGTGCCCGACCCCGTGCAGAGAGAGAGAA |
| | | TCCTGGAGGTGTACCACAGAGTGGTGGACAACCACGAGCCCCTGCACCTGGTGGCCCAC |
| | | GACCTGAACAGAAGAGGCGTGCTGAGCCCCAAGGACTACTTCGCCCAGCTGCAGGGCAG |
| | | AGAGCCCCAGGGCAGAGAGTGGAGCGCCACCGCCCTGAAGAGAAGCATGATCAGCGAGG |
| | | CCATGCTGGGCTACGCCACCCTGAACGGCAAGACCGTGAGAGACGACGACGGCGCCCCC |
| | | CTGGTGAGAGCCGAGCCCATCCTGACCAGAGAGCAGCTGGAGGCCCTGAGAGCCGAGCT |
| | | GGTGAAGACCAGCAGAGCCAAGCCCGCCGTGAGCACCCCCAGCCTGCTGCTGAGAGTGC |
| | | TGTTCTGCGCCGTGTGCGGCGAGCCCGCCTACAAGTTCGCCGGCGGCGGCAGAAAGCAC |
| | | CCCAGATACAGATGCAGAAGCATGGGCTTCCCCAAGCACTGCGGCAACGGCACCGTGGC |
| | | CATGGCCGAGTGGGACGCCTTCTGCGAGGAGCAGGTGCTGGACCTGCTGGGCGACGCCG |
| | | AGAGACTGGAGAAGGTGTGGGTGGCCGGCAGCGACAGCGCCGTGGAGCTGGCCGAGGTG |
| | | AACGCCGAGCTGGTGGACCTGACCAGCCTGATCGGCAGCCCCGCCTACAGAGCCGGCAG |
| | | CCCCCAGAGAGAGGCCCTGGACGCCAGAATCGCCGCCCTGGCCGCCAGACAGGAGGAGC |
| | | TGGAGGGCCTGGAGGCCAGACCCAGCGGCTGGGAGTGGAGAGAGACCGGCCAGAGATTC |
| | | GGCGACTGGTGGAGAGAGCAGGACACCGCCGCCAAGAACACCTGGCTGAGAAGCATGAA |
| | | CGTGAGACTGACCTTCGACGTGAGAGGCGGCCTGACCAGAACCATCGACTTCGGCGACC |
| | | TGCAGGAGTACGAGCAGCACCTGAGACTGGGCAGCGTGGTGGAGAGACTGCACACCGGC |
| | | ATGAGCGGCAGCGGCCCCAAGAAGAAGAGAAAGGTGTGA |
| 651 | PL1949 | MPAAKRVKLDKDKKSDGKDSQKKGSRALVVIRLSRVTDATTSPERQLESCQQLCAQRGW |
| | _AA | DVVGVAEDLDVSGAVDPFDRKRRPNLARWLAFEEQPFDVIVAYRVDRLTRSIRHLQQLV |
| | | HWAEDHKKLVVSATEAHFDTTTPFAAVVIALMGTVAQMELEAIKERNRSAAHFNIRAGK |
| | | YRGSLPPWGYLPTRVDGEWRLVPDPVQRERILEVYHRVVDNHEPLHLVAHDLNRRGVLS |
| | | PKDYFAQLQGREPQGREWSATALKRSMISEAMLGYATLNGKTVRDDDGAPLVRAEPILT |
| | | REQLEALRAELVKTSRAKPAVSTPSLLLRVLFCAVCGEPAYKFAGGGRKHPRYRCRSMG |
| | | FPKHCGNGTVAMAEWDAFCEEQVLDLLGDAERLEKVWVAGSDSAVELAEVNAELVDLTS |
| | | LIGSPAYRAGSPQREALDARIAALAARQEELEGLEARPSGWEWRETGQRFGDWWREQDT |
| | | AAKNTWLRSMNVRLTFDVRGGLTRTIDFGDLQEYEQHLRLGSWVERLHTGMSGSGPKKK |
| | | RKV* |
| 652 | PL1949_ | ATGcctgctgctaagagagtgaaactggatAAGGACAAGAAATCCGATGGCAAGGACAG |
| | DNA | CCAGAAAAAAGGCAGCAGAGCCCTGGTGGTGATCAGACTGAGCAGAGTGACCGACGCCA |
| | | CCACCAGCCCCGAGAGACAGCTGGAGAGCTGCCAGCAGCTGTGCGCCCAGAGAGGCTGG |
| | | GACGTGGTGGGCGTGGCCGAGGACCTGGACGTGAGCGGCGCCGTGGACCCCTTCGACAG |
| | | AAAGAGAAGACCCAACCTGGCCAGATGGCTGGCCTTCGAGGAGCAGCCCTTCGACGTGA |
| | | TCGTGGCCTACAGAGTGGACAGACTGACCAGAAGCATCAGACACCTGCAGCAGCTGGTG |
| | | CACTGGGCCGAGGACCACAAGAAGCTGGTGGTGAGCGCCACCGAGGCCCACTTCGACAC |
| | | CACCACCCCCTTCGCCGCCGTGGTGATCGCCCTGATGGGCACCGTGGCCCAGATGGAGC |
| | | TGGAGGCCATCAAGGAGAGAAACAGAAGCGCCGCCCACTTCAACATCAGAGCCGGCAAG |
| | | TACAGAGGCAGCCTGCCCCCCTGGGGCTACCTGCCCACCAGAGTGGACGGCGAGTGGAG |
| | | ACTGGTGCCCGACCCCGTGCAGAGAGAGAGAATCCTGGAGGTGTACCACAGAGTGGTGG |
| | | ACAACCACGAGCCCCTGCACCTGGTGGCCCACGACCTGAACAGAAGAGGCGTGCTGAGC |
| | | CCCAAGGACTACTTCGCCCAGCTGCAGGGCAGAGAGCCCCAGGGCAGAGAGTGGAGCGC |
| | | CACCGCCCTGAAGAGAAGCATGATCAGCGAGGCCATGCTGGGCTACGCCACCCTGAACG |
| | | GCAAGACCGTGAGAGACGACGACGGCGCCCCCCTGGTGAGAGCCGAGCCCATCCTGACC |
| | | AGAGAGCAGCTGGAGGCCCTGAGAGCCGAGCTGGTGAAGACCAGCAGAGCCAAGCCCGC |
| | | CGTGAGCACCCCCAGCCTGCTGCTGAGAGTGCTGTTCTGCGCCGTGTGCGGCGAGCCCG |
| | | CCTACAAGTTCGCCGGCGGCGGCAGAAAGCACCCCAGATACAGATGCAGAAGCATGGGC |
| | | TTCCCCAAGCACTGCGGCAACGGCACCGTGGCCATGGCCGAGTGGGACGCCTTCTGCGA |
| | | GGAGCAGGTGCTGGACCTGCTGGGCGACGCCGAGAGACTGGAGAAGGTGTGGGTGGCCG |
| | | GCAGCGACAGCGCCGTGGAGCTGGCCGAGGTGAACGCCGAGCTGGTGGACCTGACCAGC |
| | | CTGATCGGCAGCCCCGCCTACAGAGCCGGCAGCCCCCAGAGAGAGGCCCTGGACGCCAG |
| | | AATCGCCGCCCTGGCCGCCAGACAGGAGGAGCTGGAGGGCCTGGAGGCCAGACCCAGCG |
| | | GCTGGGAGTGGAGAGAGACCGGCCAGAGATTCGGCGACTGGTGGAGAGAGCAGGACACC |
| | | GCCGCCAAGAACACCTGGCTGAGAAGCATGAACGTGAGACTGACCTTCGACGTGAGAGG |
| | | CGGCCTGACCAGAACCATCGACTTCGGCGACCTGCAGGAGTACGAGCAGCACCTGAGAC |
| | | TGGGCAGCGTGGTGGAGAGACTGCACACCGGCATGAGCGGCAGCGGCCCCAAGAAGAAG |
| | | AGAAAGGTGTGA |
| 653 | PL1950 | MPAAKRVKLDKDKKSDGKDSQKKGSRALVVIRLSRVTDATTSPERQLESCQQLCAQRGW |
| | _AA | DVVGVAEDLDVSGAVDPFDRKRRPNLARWLAFEEQPFDVIVAYRVDRLTRSIRHLQQLV |
| | | HWAEDHKKLVVSATEAHFDTTTPFAAVVIALMGTVAQMELEAIKERNRSAAHFNIRAGK |
| | | YRGSLPPWGYLPTRVDGEWRLVPDPVQRERILEVYHRVVDNHEPLHLVAHDLNRRGVLS |
| | | PKDYFAQLQGREPQGREWSATALKRSMISEAMLGYATLNGKTVRDDDGAPLVRAEPILT |
| | | REQLEALRAELVKTSRAKPAVSTPSLLLRVLFCAVCGEPAYKFAGGGRKHPRYRCRSMG |
| | | FPKHCGNGTVAMAEWDAFCEEQVLDLLGDAERLEKVWVAGSDSAVELAEVNAELVDLTS |
| | | LIGSPAYRAGSPQREALDARIAALAARQEELEGLEARPSGWEWRETGQRFGDWWREQDT |
| | | AAKNTWLRSMNVRLTFDVRGGLTRTIDFGDLQEYEQHLRLGSVVERLHTGMS* |
| 654 | PL1950_ | ATGcctgctgctaagagagtgaaactggatAAGGACAAGAAATCCGATGGCAAGGACAG |
| | DNA | CCAGAAAAAAGGCAGCAGAGCCCTGGTGGTGATCAGACTGAGCAGAGTGACCGACGCCA |
| | | CCACCAGCCCCGAGAGACAGCTGGAGAGCTGCCAGCAGCTGTGCGCCCAGAGAGGCTGG |
| | | GACGTGGTGGGCGTGGCCGAGGACCTGGACGTGAGCGGCGCCGTGGACCCCTTCGACAG |
| | | AAAGAGAAGACCCAACCTGGCCAGATGGCTGGCCTTCGAGGAGCAGCCCTTCGACGTGA |
| | | TCGTGGCCTACAGAGTGGACAGACTGACCAGAAGCATCAGACACCTGCAGCAGCTGGTG |
| | | CACTGGGCCGAGGACCACAAGAAGCTGGTGGTGAGCGCCACCGAGGCCCACTTCGACAC |
| | | CACCACCCCCTTCGCCGCCGTGGTGATCGCCCTGATGGGCACCGTGGCCCAGATGGAGC |
| | | TGGAGGCCATCAAGGAGAGAAACAGAAGCGCCGCCCACTTCAACATCAGAGCCGGCAAG |
| | | TACAGAGGCAGCCTGCCCCCCTGGGGCTACCTGCCCACCAGAGTGGACGGCGAGTGGAG |
| | | ACTGGTGCCCGACCCCGTGCAGAGAGAGAGAATCCTGGAGGTGTACCACAGAGTGGTGG |
| | | ACAACCACGAGCCCCTGCACCTGGTGGCCCACGACCTGAACAGAAGAGGCGTGCTGAGC |
| | | CCCAAGGACTACTTCGCCCAGCTGCAGGGCAGAGAGCCCCAGGGCAGAGAGTGGAGCGC |
| | | CACCGCCCTGAAGAGAAGCATGATCAGCGAGGCCATGCTGGGCTACGCCACCCTGAACG |
| | | GCAAGACCGTGAGAGACGACGACGGCGCCCCCCTGGTGAGAGCCGAGCCCATCCTGACC |
| | | AGAGAGCAGCTGGAGGCCCTGAGAGCCGAGCTGGTGAAGACCAGCAGAGCCAAGCCCGC |
| | | CGTGAGCACCCCCAGCCTGCTGCTGAGAGTGCTGTTCTGCGCCGTGTGCGGCGAGCCCG |
| | | CCTACAAGTTCGCCGGCGGCGGCAGAAAGCACCCCAGATACAGATGCAGAAGCATGGGC |
| | | TTCCCCAAGCACTGCGGCAACGGCACCGTGGCCATGGCCGAGTGGGACGCCTTCTGCGA |
| | | GGAGCAGGTGCTGGACCTGCTGGGCGACGCCGAGAGACTGGAGAAGGTGTGGGTGGCCG |
| | | GCAGCGACAGCGCCGTGGAGCTGGCCGAGGTGAACGCCGAGCTGGTGGACCTGACCAGC |
| | | CTGATCGGCAGCCCCGCCTACAGAGCCGGCAGCCCCCAGAGAGAGGCCCTGGACGCCAG |
| | | AATCGCCGCCCTGGCCGCCAGACAGGAGGAGCTGGAGGGCCTGGAGGCCAGACCCAGCG |
| | | GCTGGGAGTGGAGAGAGACCGGCCAGAGATTCGGCGACTGGTGGAGAGAGCAGGACACC |
| | | GCCGCCAAGAACACCTGGCTGAGAAGCATGAACGTGAGACTGACCTTCGACGTGAGAGG |
| | | CGGCCTGACCAGAACCATCGACTTCGGCGACCTGCAGGAGTACGAGCAGCACCTGAGAC |
| | | TGGGCAGCGTGGTGGAGAGACTGCACACCGGCATGAGCTGA |
| 655 | PL1951 | MPAAKRVKLDGSRALVVIRLSRVTDATTSPERQLESCQQLCAQRGWDVVGVAEDLDVSG |
| | _AA | AVDPFDRKRRPNLARWLAFEEQPFDVIVAYRVDRLTRSIRHLQQLVHWAEDHKKLVVSA |
| | | TEAHFDTTTPFAAVVIALMGTVAQMELEAIKERNRSAAHFNIRAGKYRGSLPPWGYLPT |
| | | RVDGEWRLVPDPVQRERILEVYHRVVDNHEPLHLVAHDLNRRGVLSPKDYFAQLQGREP |
| | | QGREWSATALKRSMISEAMLGYATLNGKTVRDDDGAPLVRAEPILTREQLEALRAELVK |
| | | TSRAKPAVSTPSLLLRVLFCAVCGEPAYKFAGGGRKHPRYRCRSMGFPKHCGNGTVAMA |
| | | EWDAFCEEQVLDLLGDAERLEKVWVAGSDSAVELAEVNAELVDLTSLIGSPAYRAGSPQ |
| | | REALDARIAALAARQEELEGLEARPSGWEWRETGQRFGDWWREQDTAAKNTWLRSMNVR |
| | | LTFDVRGGLTRTIDFGDLQEYEQHLRLGSVVERLHTGMS* |
| 656 | PL1951_ | ATGcctgctgctaagagagtgaaactggatGGCAGCAGAGCCCTGGTGGTGATCAGACT |
| | DNA | GAGCAGAGTGACCGACGCCACCACCAGCCCCGAGAGACAGCTGGAGAGCTGCCAGCAGC |
| | | TGTGCGCCCAGAGAGGCTGGGACGTGGTGGGCGTGGCCGAGGACCTGGACGTGAGCGGC |
| | | GCCGTGGACCCCTTCGACAGAAAGAGAAGACCCAACCTGGCCAGATGGCTGGCCTTCGA |
| | | GGAGCAGCCCTTCGACGTGATCGTGGCCTACAGAGTGGACAGACTGACCAGAAGCATCA |
| | | GACACCTGCAGCAGCTGGTGCACTGGGCCGAGGACCACAAGAAGCTGGTGGTGAGCGCC |
| | | ACCGAGGCCCACTTCGACACCACCACCCCCTTCGCCGCCGTGGTGATCGCCCTGATGGG |
| | | CACCGTGGCCCAGATGGAGCTGGAGGCCATCAAGGAGAGAAACAGAAGCGCCGCCCACT |
| | | TCAACATCAGAGCCGGCAAGTACAGAGGCAGCCTGCCCCCCTGGGGCTACCTGCCCACC |
| | | AGAGTGGACGGCGAGTGGAGACTGGTGCCCGACCCCGTGCAGAGAGAGAGAATCCTGGA |
| | | GGTGTACCACAGAGTGGTGGACAACCACGAGCCCCTGCACCTGGTGGCCCACGACCTGA |
| | | ACAGAAGAGGCGTGCTGAGCCCCAAGGACTACTTCGCCCAGCTGCAGGGCAGAGAGCCC |
| | | CAGGGCAGAGAGTGGAGCGCCACCGCCCTGAAGAGAAGCATGATCAGCGAGGCCATGCT |
| | | GGGCTACGCCACCCTGAACGGCAAGACCGTGAGAGACGACGACGGCGCCCCCCTGGTGA |
| | | GAGCCGAGCCCATCCTGACCAGAGAGCAGCTGGAGGCCCTGAGAGCCGAGCTGGTGAAG |
| | | ACCAGCAGAGCCAAGCCCGCCGTGAGCACCCCCAGCCTGCTGCTGAGAGTGCTGTTCTG |
| | | CGCCGTGTGCGGCGAGCCCGCCTACAAGTTCGCCGGCGGCGGCAGAAAGCACCCCAGAT |
| | | ACAGATGCAGAAGCATGGGCTTCCCCAAGCACTGCGGCAACGGCACCGTGGCCATGGCC |
| | | GAGTGGGACGCCTTCTGCGAGGAGCAGGTGCTGGACCTGCTGGGCGACGCCGAGAGACT |
| | | GGAGAAGGTGTGGGTGGCCGGCAGCGACAGCGCCGTGGAGCTGGCCGAGGTGAACGCCG |
| | | AGCTGGTGGACCTGACCAGCCTGATCGGCAGCCCCGCCTACAGAGCCGGCAGCCCCCAG |
| | | AGAGAGGCCCTGGACGCCAGAATCGCCGCCCTGGCCGCCAGACAGGAGGAGCTGGAGGG |
| | | CCTGGAGGCCAGACCCAGCGGCTGGGAGTGGAGAGAGACCGGCCAGAGATTCGGCGACT |
| | | GGTGGAGAGAGCAGGACACCGCCGCCAAGAACACCTGGCTGAGAAGCATGAACGTGAGA |
| | | CTGACCTTCGACGTGAGAGGCGGCCTGACCAGAACCATCGACTTCGGCGACCTGCAGGA |
| | | GTACGAGCAGCACCTGAGACTGGGCAGCGTGGTGGAGAGACTGCACACCGGCATGAGCT |
| | | GA |
| 657 | PL2087 | MPKKKRKVYPYDVPDYAKDGKKDKKEEDKKGSRALVVIRLSRVTDATTSPERQLESCQQ |
| | _AA | LCAQRGWDVVGVAEDLDVSGAVDPFDRKRRPNLARWLAFEEQPFDVIVAYRVDRLTRSI |
| | | RHLQQLVHWAEDHKKLVVSATEAHFDTTTPFAAVVIALMGTVAQMELEAIKERNRSAAH |
| | | FNIRAGKYRGSLPPWGYLPTRVDGEWRLVPDPVQRERILEVYHRVVDNHEPLHLVAHDL |
| | | NRRGVLSPKDYFAQLQGREPQGREWSATALKRSMISEAMLGYATLNGKTVRDDDGAPLV |
| | | RAEPILTREQLEALRAELVKTSRAKPAVSTPSLLLRVLFCAVCGEPAYKFAGGGRKHPR |
| | | YRCRSMGFPKHCGNGTVAMAEWDAFCEEQVLDLLGDAERLEKVWVAGSDSAVELAEVNA |
| | | ELVDLTSLIGSPAYRAGSPQREALDARIAALAARQEELEGLEARPSGWEWRETGQRFGD |
| | | WWREQDTAAKNTWLRSMNVRLTFDVRGGLTRTIDFGDLQEYEQHLRLGSVVERLHTGMS |
| | | * |
| 658 | PL2087_ | ATGCCCAAGAAGAAGAGAAAGGTGTACCCCTACGACGTGCCCGACTACGCCAAGGACGG |
| | DNA | CAAGAAGGACAAGAAGGAGGAGGACAAGAAGGGCAGCAGAGCCCTGGTGGTGATCAGAC |
| | | TGAGCAGAGTGACCGACGCCACCACCAGCCCCGAGAGACAGCTGGAGAGCTGCCAGCAG |
| | | CTGTGCGCCCAGAGAGGCTGGGACGTGGTGGGCGTGGCCGAGGACCTGGACGTGAGCGG |
| | | CGCCGTGGACCCCTTCGACAGAAAGAGAAGACCCAACCTGGCCAGATGGCTGGCCTTCG |
| | | AGGAGCAGCCCTTCGACGTGATCGTGGCCTACAGAGTGGACAGACTGACCAGAAGCATC |
| | | AGACACCTGCAGCAGCTGGTGCACTGGGCCGAGGACCACAAGAAGCTGGTGGTGAGCGC |
| | | CACCGAGGCCCACTTCGACACCACCACCCCCTTCGCCGCCGTGGTGATCGCCCTGATGG |
| | | GCACCGTGGCCCAGATGGAGCTGGAGGCCATCAAGGAGAGAAACAGAAGCGCCGCCCAC |
| | | TTCAACATCAGAGCCGGCAAGTACAGAGGCAGCCTGCCCCCCTGGGGCTACCTGCCCAC |
| | | CAGAGTGGACGGCGAGTGGAGACTGGTGCCCGACCCCGTGCAGAGAGAGAGAATCCTGG |
| | | AGGTGTACCACAGAGTGGTGGACAACCACGAGCCCCTGCACCTGGTGGCCCACGACCTG |
| | | AACAGAAGAGGCGTGCTGAGCCCCAAGGACTACTTCGCCCAGCTGCAGGGCAGAGAGCC |
| | | CCAGGGCAGAGAGTGGAGCGCCACCGCCCTGAAGAGAAGCATGATCAGCGAGGCCATGC |
| | | TGGGCTACGCCACCCTGAACGGCAAGACCGTGAGAGACGACGACGGCGCCCCCCTGGTG |
| | | AGAGCCGAGCCCATCCTGACCAGAGAGCAGCTGGAGGCCCTGAGAGCCGAGCTGGTGAA |
| | | GACCAGCAGAGCCAAGCCCGCCGTGAGCACCCCCAGCCTGCTGCTGAGAGTGCTGTTCT |
| | | GCGCCGTGTGCGGCGAGCCCGCCTACAAGTTCGCCGGCGGCGGCAGAAAGCACCCCAGA |
| | | TACAGATGCAGAAGCATGGGCTTCCCCAAGCACTGCGGCAACGGCACCGTGGCCATGGC |
| | | CGAGTGGGACGCCTTCTGCGAGGAGCAGGTGCTGGACCTGCTGGGCGACGCCGAGAGAC |
| | | TGGAGAAGGTGTGGGTGGCCGGCAGCGACAGCGCCGTGGAGCTGGCCGAGGTGAACGCC |
| | | GAGCTGGTGGACCTGACCAGCCTGATCGGCAGCCCCGCCTACAGAGCCGGCAGCCCCCA |
| | | GAGAGAGGCCCTGGACGCCAGAATCGCCGCCCTGGCCGCCAGACAGGAGGAGCTGGAGG |
| | | GCCTGGAGGCCAGACCCAGCGGCTGGGAGTGGAGAGAGACCGGCCAGAGATTCGGCGAC |
| | | TGGTGGAGAGAGCAGGACACCGCCGCCAAGAACACCTGGCTGAGAAGCATGAACGTGAG |
| | | ACTGACCTTCGACGTGAGAGGCGGCCTGACCAGAACCATCGACTTCGGCGACCTGCAGG |
| | | AGTACGAGCAGCACCTGAGACTGGGCAGCGTGGTGGAGAGACTGCACACCGGCATGAGC |
| | | TGA |
| 659 | PL2088 | MPKKKRKVYPYDVPDYAKDGKKDKKEEDKKGSRALVVIRLSRVTDATTSPERQLESCQQ |
| | _AA | LCAQRGWDVVGVAEDLDVSGAVDPFDRKRRPNLARWLAFEEQPFDVIVAYRVDRLTRSI |
| | | RHLQQLVHWAEDHKKLVVSATEAHFDTTTPFAAVVIALMGTVAQMELEAIKERNRSAAH |
| | | FNIRAGKYRGSLPPWGYLPTRVDGEWRLVPDPVQRERILEVYHRVVDNHEPLHLVAHDL |
| | | NRRGVLSPKDYFAQLQGREPQGREWSATALKRSMISEAMLGYATLNGKTVRDDDGAPLV |
| | | RAEPILTREQLEALRAELVKTSRAKPAVSTPSLLLRVLFCAVCGEPAYKFAGGGRKHPR |
| | | YRCRSMGFPKHCGNGTVAMAEWDAFCEEQVLDLLGDAERLEKVWVAGSDSAVELAEVNA |
| | | ELVDLTSLIGSPAYRAGSPQREALDARIAALAARQEELEGLEARPSGWEWRETGQRFGD |
| | | WWREQDTAAKNTWLRSMNVRLTFDVRGGLTRTIDFGDLQEYEQHLRLGSVVERLHTGMS |
| | | GSGKDGKKDKKEEDKK* |
| 660 | PL2088_ | ATGCCCAAGAAGAAGAGAAAGGTGTACCCCTACGACGTGCCCGACTACGCCAAGGACGG |
| | DNA | CAAGAAGGACAAGAAGGAGGAGGACAAGAAGGGCAGCAGAGCCCTGGTGGTGATCAGAC |
| | | TGAGCAGAGTGACCGACGCCACCACCAGCCCCGAGAGACAGCTGGAGAGCTGCCAGCAG |
| | | CTGTGCGCCCAGAGAGGCTGGGACGTGGTGGGCGTGGCCGAGGACCTGGACGTGAGCGG |
| | | CGCCGTGGACCCCTTCGACAGAAAGAGAAGACCCAACCTGGCCAGATGGCTGGCCTTCG |
| | | AGGAGCAGCCCTTCGACGTGATCGTGGCCTACAGAGTGGACAGACTGACCAGAAGCATC |
| | | AGACACCTGCAGCAGCTGGTGCACTGGGCCGAGGACCACAAGAAGCTGGTGGTGAGCGC |
| | | CACCGAGGCCCACTTCGACACCACCACCCCCTTCGCCGCCGTGGTGATCGCCCTGATGG |
| | | GCACCGTGGCCCAGATGGAGCTGGAGGCCATCAAGGAGAGAAACAGAAGCGCCGCCCAC |
| | | TTCAACATCAGAGCCGGCAAGTACAGAGGCAGCCTGCCCCCCTGGGGCTACCTGCCCAC |
| | | CAGAGTGGACGGCGAGTGGAGACTGGTGCCCGACCCCGTGCAGAGAGAGAGAATCCTGG |
| | | AGGTGTACCACAGAGTGGTGGACAACCACGAGCCCCTGCACCTGGTGGCCCACGACCTG |
| | | AACAGAAGAGGCGTGCTGAGCCCCAAGGACTACTTCGCCCAGCTGCAGGGCAGAGAGCC |
| | | CCAGGGCAGAGAGTGGAGCGCCACCGCCCTGAAGAGAAGCATGATCAGCGAGGCCATGC |
| | | TGGGCTACGCCACCCTGAACGGCAAGACCGTGAGAGACGACGACGGCGCCCCCCTGGTG |
| | | AGAGCCGAGCCCATCCTGACCAGAGAGCAGCTGGAGGCCCTGAGAGCCGAGCTGGTGAA |
| | | GACCAGCAGAGCCAAGCCCGCCGTGAGCACCCCCAGCCTGCTGCTGAGAGTGCTGTTCT |
| | | GCGCCGTGTGCGGCGAGCCCGCCTACAAGTTCGCCGGCGGCGGCAGAAAGCACCCCAGA |
| | | TACAGATGCAGAAGCATGGGCTTCCCCAAGCACTGCGGCAACGGCACCGTGGCCATGGC |
| | | CGAGTGGGACGCCTTCTGCGAGGAGCAGGTGCTGGACCTGCTGGGCGACGCCGAGAGAC |
| | | TGGAGAAGGTGTGGGTGGCCGGCAGCGACAGCGCCGTGGAGCTGGCCGAGGTGAACGCC |
| | | GAGCTGGTGGACCTGACCAGCCTGATCGGCAGCCCCGCCTACAGAGCCGGCAGCCCCCA |
| | | GAGAGAGGCCCTGGACGCCAGAATCGCCGCCCTGGCCGCCAGACAGGAGGAGCTGGAGG |
| | | GCCTGGAGGCCAGACCCAGCGGCTGGGAGTGGAGAGAGACCGGCCAGAGATTCGGCGAC |
| | | TGGTGGAGAGAGCAGGACACCGCCGCCAAGAACACCTGGCTGAGAAGCATGAACGTGAG |
| | | ACTGACCTTCGACGTGAGAGGCGGCCTGACCAGAACCATCGACTTCGGCGACCTGCAGG |
| | | AGTACGAGCAGCACCTGAGACTGGGCAGCGTGGTGGAGAGACTGCACACCGGCATGAGC |
| | | GGCAGCGGCAAGGACGGCAAGAAGGACAAGAAGGAGGAGGACAAGAAGTGA |
| 661 | PL2089 | MPKKKRKVYPYDVPDYAQPRFAAAGSGKDGKKDKKEEDKKGSRALVVIRLSRVTDATTS |
| | _AA | PERQLESCQQLCAQRGWDVVGVAEDLDVSGAVDPFDRKRRPNLARWLAFEEQPFDVIVA |
| | | YRVDRLTRSIRHLQQLVHWAEDHKKLVVSATEAHFDTTTPFAAVVIALMGTVAQMELEA |
| | | IKERNRSAAHFNIRAGKYRGSLPPWGYLPTRVDGEWRLVPDPVQRERILEVYHRVVDNH |
| | | EPLHLVAHDLNRRGVLSPKDYFAQLQGREPQGREWSATALKRSMISEAMLGYATLNGKT |
| | | VRDDDGAPLVRAEPILTREQLEALRAELVKTSRAKPAVSTPSLLLRVLFCAVCGEPAYK |
| | | FAGGGRKHPRYRCRSMGFPKHCGNGTVAMAEWDAFCEEQVLDLLGDAERLEKVWVAGSD |
| | | SAVELAEVNAELVDLTSLIGSPAYRAGSPQREALDARIAALAARQEELEGLEARPSGWE |
| | | WRETGQRFGDWWREQDTAAKNTWLRSMNVRLTFDVRGGLTRTIDFGDLQEYEQHLRLGS |
| | | WVERLHTGMS* |
| 662 | PL2089_ | ATGCCCAAGAAGAAGAGAAAGGTGTACCCCTACGACGTGCCCGACTACGCCCAACCGCG |
| | DNA | GTTCGCGGCCGCTGGCAGCGGCAAGGACGGCAAGAAGGACAAGAAGGAGGAGGACAAGA |
| | | AGGGCAGCAGAGCCCTGGTGGTGATCAGACTGAGCAGAGTGACCGACGCCACCACCAGC |
| | | CCCGAGAGACAGCTGGAGAGCTGCCAGCAGCTGTGCGCCCAGAGAGGCTGGGACGTGGT |
| | | GGGCGTGGCCGAGGACCTGGACGTGAGCGGCGCCGTGGACCCCTTCGACAGAAAGAGAA |
| | | GACCCAACCTGGCCAGATGGCTGGCCTTCGAGGAGCAGCCCTTCGACGTGATCGTGGCC |
| | | TACAGAGTGGACAGACTGACCAGAAGCATCAGACACCTGCAGCAGCTGGTGCACTGGGC |
| | | CGAGGACCACAAGAAGCTGGTGGTGAGCGCCACCGAGGCCCACTTCGACACCACCACCC |
| | | CCTTCGCCGCCGTGGTGATCGCCCTGATGGGCACCGTGGCCCAGATGGAGCTGGAGGCC |
| | | ATCAAGGAGAGAAACAGAAGCGCCGCCCACTTCAACATCAGAGCCGGCAAGTACAGAGG |
| | | CAGCCTGCCCCCCTGGGGCTACCTGCCCACCAGAGTGGACGGCGAGTGGAGACTGGTGC |
| | | CCGACCCCGTGCAGAGAGAGAGAATCCTGGAGGTGTACCACAGAGTGGTGGACAACCAC |
| | | GAGCCCCTGCACCTGGTGGCCCACGACCTGAACAGAAGAGGCGTGCTGAGCCCCAAGGA |
| | | CTACTTCGCCCAGCTGCAGGGCAGAGAGCCCCAGGGCAGAGAGTGGAGCGCCACCGCCC |
| | | TGAAGAGAAGCATGATCAGCGAGGCCATGCTGGGCTACGCCACCCTGAACGGCAAGACC |
| | | GTGAGAGACGACGACGGCGCCCCCCTGGTGAGAGCCGAGCCCATCCTGACCAGAGAGCA |
| | | GCTGGAGGCCCTGAGAGCCGAGCTGGTGAAGACCAGCAGAGCCAAGCCCGCCGTGAGCA |
| | | CCCCCAGCCTGCTGCTGAGAGTGCTGTTCTGCGCCGTGTGCGGCGAGCCCGCCTACAAG |
| | | TTCGCCGGCGGCGGCAGAAAGCACCCCAGATACAGATGCAGAAGCATGGGCTTCCCCAA |
| | | GCACTGCGGCAACGGCACCGTGGCCATGGCCGAGTGGGACGCCTTCTGCGAGGAGCAGG |
| | | TGCTGGACCTGCTGGGCGACGCCGAGAGACTGGAGAAGGTGTGGGTGGCCGGCAGCGAC |
| | | AGCGCCGTGGAGCTGGCCGAGGTGAACGCCGAGCTGGTGGACCTGACCAGCCTGATCGG |
| | | CAGCCCCGCCTACAGAGCCGGCAGCCCCCAGAGAGAGGCCCTGGACGCCAGAATCGCCG |
| | | CCCTGGCCGCCAGACAGGAGGAGCTGGAGGGCCTGGAGGCCAGACCCAGCGGCTGGGAG |
| | | TGGAGAGAGACCGGCCAGAGATTCGGCGACTGGTGGAGAGAGCAGGACACCGCCGCCAA |
| | | GAACACCTGGCTGAGAAGCATGAACGTGAGACTGACCTTCGACGTGAGAGGCGGCCTGA |
| | | CCAGAACCATCGACTTCGGCGACCTGCAGGAGTACGAGCAGCACCTGAGACTGGGCAGC |
| | | GTGGTGGAGAGACTGCACACCGGCATGAGCTGA |
| 663 | PL2090 | MPKKKRKVYPYDVPDYAQPRFAAAGSGKDGKKDKKEEDKKGSRALVVIRLSRVTDATTS |
| | _AA | PERQLESCQQLCAQRGWDVVGVAEDLDVSGAVDPFDRKRRPNLARWLAFEEQPFDVIVA |
| | | YRVDRLTRSIRHLQQLVHWAEDHKKLVVSATEAHFDTTTPFAAVVIALMGTVAQMELEA |
| | | IKERNRSAAHFNIRAGKYRGSLPPWGYLPTRVDGEWRLVPDPVQRERILEVYHRVVDNH |
| | | EPLHLVAHDLNRRGVLSPKDYFAQLQGREPQGREWSATALKRSMISEAMLGYATLNGKT |
| | | VRDDDGAPLVRAEPILTREQLEALRAELVKTSRAKPAVSTPSLLLRVLFCAVCGEPAYK |
| | | FAGGGRKHPRYRCRSMGFPKHCGNGTVAMAEWDAFCEEQVLDLLGDAERLEKVWVAGSD |
| | | SAVELAEVNAELVDLTSLIGSPAYRAGSPQREALDARIAALAARQEELEGLEARPSGWE |
| | | WRETGQRFGDWWREQDTAAKNTWLRSMNVRLTFDVRGGLTRTIDFGDLQEYEQHLRLGS |
| | | WVERLHTGMSGSGKDGKKDKKEEDKK* |
| 664 | PL2090_ | ATGCCCAAGAAGAAGAGAAAGGTGTACCCCTACGACGTGCCCGACTACGCCCAACCGCG |
| | DNA | GTTCGCGGCCGCTGGCAGCGGCAAGGACGGCAAGAAGGACAAGAAGGAGGAGGACAAGA |
| | | AGGGCAGCAGAGCCCTGGTGGTGATCAGACTGAGCAGAGTGACCGACGCCACCACCAGC |
| | | CCCGAGAGACAGCTGGAGAGCTGCCAGCAGCTGTGCGCCCAGAGAGGCTGGGACGTGGT |
| | | GGGCGTGGCCGAGGACCTGGACGTGAGCGGCGCCGTGGACCCCTTCGACAGAAAGAGAA |
| | | GACCCAACCTGGCCAGATGGCTGGCCTTCGAGGAGCAGCCCTTCGACGTGATCGTGGCC |
| | | TACAGAGTGGACAGACTGACCAGAAGCATCAGACACCTGCAGCAGCTGGTGCACTGGGC |
| | | CGAGGACCACAAGAAGCTGGTGGTGAGCGCCACCGAGGCCCACTTCGACACCACCACCC |
| | | CCTTCGCCGCCGTGGTGATCGCCCTGATGGGCACCGTGGCCCAGATGGAGCTGGAGGCC |
| | | ATCAAGGAGAGAAACAGAAGCGCCGCCCACTTCAACATCAGAGCCGGCAAGTACAGAGG |
| | | CAGCCTGCCCCCCTGGGGCTACCTGCCCACCAGAGTGGACGGCGAGTGGAGACTGGTGC |
| | | CCGACCCCGTGCAGAGAGAGAGAATCCTGGAGGTGTACCACAGAGTGGTGGACAACCAC |
| | | GAGCCCCTGCACCTGGTGGCCCACGACCTGAACAGAAGAGGCGTGCTGAGCCCCAAGGA |
| | | CTACTTCGCCCAGCTGCAGGGCAGAGAGCCCCAGGGCAGAGAGTGGAGCGCCACCGCCC |
| | | TGAAGAGAAGCATGATCAGCGAGGCCATGCTGGGCTACGCCACCCTGAACGGCAAGACC |
| | | GTGAGAGACGACGACGGCGCCCCCCTGGTGAGAGCCGAGCCCATCCTGACCAGAGAGCA |
| | | GCTGGAGGCCCTGAGAGCCGAGCTGGTGAAGACCAGCAGAGCCAAGCCCGCCGTGAGCA |
| | | CCCCCAGCCTGCTGCTGAGAGTGCTGTTCTGCGCCGTGTGCGGCGAGCCCGCCTACAAG |
| | | TTCGCCGGCGGCGGCAGAAAGCACCCCAGATACAGATGCAGAAGCATGGGCTTCCCCAA |
| | | GCACTGCGGCAACGGCACCGTGGCCATGGCCGAGTGGGACGCCTTCTGCGAGGAGCAGG |
| | | TGCTGGACCTGCTGGGCGACGCCGAGAGACTGGAGAAGGTGTGGGTGGCCGGCAGCGAC |
| | | AGCGCCGTGGAGCTGGCCGAGGTGAACGCCGAGCTGGTGGACCTGACCAGCCTGATCGG |
| | | CAGCCCCGCCTACAGAGCCGGCAGCCCCCAGAGAGAGGCCCTGGACGCCAGAATCGCCG |
| | | CCCTGGCCGCCAGACAGGAGGAGCTGGAGGGCCTGGAGGCCAGACCCAGCGGCTGGGAG |
| | | TGGAGAGAGACCGGCCAGAGATTCGGCGACTGGTGGAGAGAGCAGGACACCGCCGCCAA |
| | | GAACACCTGGCTGAGAAGCATGAACGTGAGACTGACCTTCGACGTGAGAGGCGGCCTGA |
| | | CCAGAACCATCGACTTCGGCGACCTGCAGGAGTACGAGCAGCACCTGAGACTGGGCAGC |
| | | GTGGTGGAGAGACTGCACACCGGCATGAGCGGCAGCGGCAAGGACGGCAAGAAGGACAA |
| | | GAAGGAGGAGGACAAGAAGTGA |
| 665 | PL2091 | MPKKKRKVYPYDVPDYAKDGKKDKKEEDKKGSGQPRFAAAGSRALVVIRLSRVTDATTS |
| | _AA | PERQLESCQQLCAQRGWDVVGVAEDLDVSGAVDPFDRKRRPNLARWLAFEEQPFDVIVA |
| | | YRVDRLTRSIRHLQQLVHWAEDHKKLVVSATEAHFDTTTPFAAVVIALMGTVAQMELEA |
| | | IKERNRSAAHFNIRAGKYRGSLPPWGYLPTRVDGEWRLVPDPVQRERILEVYHRVVDNH |
| | | EPLHLVAHDLNRRGVLSPKDYFAQLQGREPQGREWSATALKRSMISEAMLGYATLNGKT |
| | | VRDDDGAPLVRAEPILTREQLEALRAELVKTSRAKPAVSTPSLLLRVLFCAVCGEPAYK |
| | | FAGGGRKHPRYRCRSMGFPKHCGNGTVAMAEWDAFCEEQVLDLLGDAERLEKVWVAGSD |
| | | SAVELAEVNAELVDLTSLIGSPAYRAGSPQREALDARIAALAARQEELEGLEARPSGWE |
| | | WRETGQRFGDWWREQDTAAKNTWLRSMNVRLTFDVRGGLTRTIDFGDLQEYEQHLRLGS |
| | | VVERLHTGMS* |
| 666 | PL2091_ | ATGCCCAAGAAGAAGAGAAAGGTGTACCCCTACGACGTGCCCGACTACGCCAAGGACGG |
| | DNA | CAAGAAGGACAAGAAGGAGGAGGACAAGAAGGGCAGCGGCCAACCGCGGTTCGCGGCCG |
| | | CTGGCAGCAGAGCCCTGGTGGTGATCAGACTGAGCAGAGTGACCGACGCCACCACCAGC |
| | | CCCGAGAGACAGCTGGAGAGCTGCCAGCAGCTGTGCGCCCAGAGAGGCTGGGACGTGGT |
| | | GGGCGTGGCCGAGGACCTGGACGTGAGCGGCGCCGTGGACCCCTTCGACAGAAAGAGAA |
| | | GACCCAACCTGGCCAGATGGCTGGCCTTCGAGGAGCAGCCCTTCGACGTGATCGTGGCC |
| | | TACAGAGTGGACAGACTGACCAGAAGCATCAGACACCTGCAGCAGCTGGTGCACTGGGC |
| | | CGAGGACCACAAGAAGCTGGTGGTGAGCGCCACCGAGGCCCACTTCGACACCACCACCC |
| | | CCTTCGCCGCCGTGGTGATCGCCCTGATGGGCACCGTGGCCCAGATGGAGCTGGAGGCC |
| | | ATCAAGGAGAGAAACAGAAGCGCCGCCCACTTCAACATCAGAGCCGGCAAGTACAGAGG |
| | | CAGCCTGCCCCCCTGGGGCTACCTGCCCACCAGAGTGGACGGCGAGTGGAGACTGGTGC |
| | | CCGACCCCGTGCAGAGAGAGAGAATCCTGGAGGTGTACCACAGAGTGGTGGACAACCAC |
| | | GAGCCCCTGCACCTGGTGGCCCACGACCTGAACAGAAGAGGCGTGCTGAGCCCCAAGGA |
| | | CTACTTCGCCCAGCTGCAGGGCAGAGAGCCCCAGGGCAGAGAGTGGAGCGCCACCGCCC |
| | | TGAAGAGAAGCATGATCAGCGAGGCCATGCTGGGCTACGCCACCCTGAACGGCAAGACC |
| | | GTGAGAGACGACGACGGCGCCCCCCTGGTGAGAGCCGAGCCCATCCTGACCAGAGAGCA |
| | | GCTGGAGGCCCTGAGAGCCGAGCTGGTGAAGACCAGCAGAGCCAAGCCCGCCGTGAGCA |
| | | CCCCCAGCCTGCTGCTGAGAGTGCTGTTCTGCGCCGTGTGCGGCGAGCCCGCCTACAAG |
| | | TTCGCCGGCGGCGGCAGAAAGCACCCCAGATACAGATGCAGAAGCATGGGCTTCCCCAA |
| | | GCACTGCGGCAACGGCACCGTGGCCATGGCCGAGTGGGACGCCTTCTGCGAGGAGCAGG |
| | | TGCTGGACCTGCTGGGCGACGCCGAGAGACTGGAGAAGGTGTGGGTGGCCGGCAGCGAC |
| | | AGCGCCGTGGAGCTGGCCGAGGTGAACGCCGAGCTGGTGGACCTGACCAGCCTGATCGG |
| | | CAGCCCCGCCTACAGAGCCGGCAGCCCCCAGAGAGAGGCCCTGGACGCCAGAATCGCCG |
| | | CCCTGGCCGCCAGACAGGAGGAGCTGGAGGGCCTGGAGGCCAGACCCAGCGGCTGGGAG |
| | | TGGAGAGAGACCGGCCAGAGATTCGGCGACTGGTGGAGAGAGCAGGACACCGCCGCCAA |
| | | GAACACCTGGCTGAGAAGCATGAACGTGAGACTGACCTTCGACGTGAGAGGCGGCCTGA |
| | | CCAGAACCATCGACTTCGGCGACCTGCAGGAGTACGAGCAGCACCTGAGACTGGGCAGC |
| | | GTGGTGGAGAGACTGCACACCGGCATGAGCTGA |
| 667 | PL2092 | MPKKKRKVYPYDVPDYAKDGKKDKKEEDKKGSGQPRFAAAGSRALWIRLSRVTDATTSP |
| | _AA | ERQLESCQQLCAQRGWDVVGVAEDLDVSGAVDPFDRKRRPNLARWLAFEEQPFDVIVAY |
| | | RVDRLTRSIRHLQQLVHWAEDHKKLVVSATEAHFDTTTPFAAVVIALMGTVAQMELEAI |
| | | KERNRSAAHFNIRAGKYRGSLPPWGYLPTRVDGEWRLVPDPVQRERILEVYHRVVDNHE |
| | | PLHLVAHDLNRRGVLSPKDYFAQLQGREPQGREWSATALKRSMISEAMLGYATLNGKTV |
| | | RDDDGAPLVRAEPILTREQLEALRAELVKTSRAKPAVSTPSLLLRVLFCAVCGEPAYKF |
| | | AGGGRKHPRYRCRSMGFPKHCGNGTVAMAEWDAFCEEQVLDLLGDAERLEKVWVAGSDS |
| | | AVELAEVNAELVDLTSLIGSPAYRAGSPQREALDARIAALAARQEELEGLEARPSGWEW |
| | | RETGQRFGDWWREQDTAAKNTWLRSMNVRLTFDVRGGLTRTIDFGDLQEYEQHLRLGSW |
| | | VERLHTGMSGSGKDGKKDKKEEDKK* |
| 668 | PL2092_ | ATGCCCAAGAAGAAGAGAAAGGTGTACCCCTACGACGTGCCCGACTACGCCAAGGACGG |
| | DNA | CAAGAAGGACAAGAAGGAGGAGGACAAGAAGGGCAGCGGCCAACCGCGGTTCGCGGCCG |
| | | CTGGCAGCAGAGCCCTGGTGGTGATCAGACTGAGCAGAGTGACCGACGCCACCACCAGC |
| | | CCCGAGAGACAGCTGGAGAGCTGCCAGCAGCTGTGCGCCCAGAGAGGCTGGGACGTGGT |
| | | GGGCGTGGCCGAGGACCTGGACGTGAGCGGCGCCGTGGACCCCTTCGACAGAAAGAGAA |
| | | GACCCAACCTGGCCAGATGGCTGGCCTTCGAGGAGCAGCCCTTCGACGTGATCGTGGCC |
| | | TACAGAGTGGACAGACTGACCAGAAGCATCAGACACCTGCAGCAGCTGGTGCACTGGGC |
| | | CGAGGACCACAAGAAGCTGGTGGTGAGCGCCACCGAGGCCCACTTCGACACCACCACCC |
| | | CCTTCGCCGCCGTGGTGATCGCCCTGATGGGCACCGTGGCCCAGATGGAGCTGGAGGCC |
| | | ATCAAGGAGAGAAACAGAAGCGCCGCCCACTTCAACATCAGAGCCGGCAAGTACAGAGG |
| | | CAGCCTGCCCCCCTGGGGCTACCTGCCCACCAGAGTGGACGGCGAGTGGAGACTGGTGC |
| | | CCGACCCCGTGCAGAGAGAGAGAATCCTGGAGGTGTACCACAGAGTGGTGGACAACCAC |
| | | GAGCCCCTGCACCTGGTGGCCCACGACCTGAACAGAAGAGGCGTGCTGAGCCCCAAGGA |
| | | CTACTTCGCCCAGCTGCAGGGCAGAGAGCCCCAGGGCAGAGAGTGGAGCGCCACCGCCC |
| | | TGAAGAGAAGCATGATCAGCGAGGCCATGCTGGGCTACGCCACCCTGAACGGCAAGACC |
| | | GTGAGAGACGACGACGGCGCCCCCCTGGTGAGAGCCGAGCCCATCCTGACCAGAGAGCA |
| | | GCTGGAGGCCCTGAGAGCCGAGCTGGTGAAGACCAGCAGAGCCAAGCCCGCCGTGAGCA |
| | | CCCCCAGCCTGCTGCTGAGAGTGCTGTTCTGCGCCGTGTGCGGCGAGCCCGCCTACAAG |
| | | TTCGCCGGCGGCGGCAGAAAGCACCCCAGATACAGATGCAGAAGCATGGGCTTCCCCAA |
| | | GCACTGCGGCAACGGCACCGTGGCCATGGCCGAGTGGGACGCCTTCTGCGAGGAGCAGG |
| | | TGCTGGACCTGCTGGGCGACGCCGAGAGACTGGAGAAGGTGTGGGTGGCCGGCAGCGAC |
| | | AGCGCCGTGGAGCTGGCCGAGGTGAACGCCGAGCTGGTGGACCTGACCAGCCTGATCGG |
| | | CAGCCCCGCCTACAGAGCCGGCAGCCCCCAGAGAGAGGCCCTGGACGCCAGAATCGCCG |
| | | CCCTGGCCGCCAGACAGGAGGAGCTGGAGGGCCTGGAGGCCAGACCCAGCGGCTGGGAG |
| | | TGGAGAGAGACCGGCCAGAGATTCGGCGACTGGTGGAGAGAGCAGGACACCGCCGCCAA |
| | | GAACACCTGGCTGAGAAGCATGAACGTGAGACTGACCTTCGACGTGAGAGGCGGCCTGA |
| | | CCAGAACCATCGACTTCGGCGACCTGCAGGAGTACGAGCAGCACCTGAGACTGGGCAGC |
| | | GTGGTGGAGAGACTGCACACCGGCATGAGCGGCAGCGGCAAGGACGGCAAGAAGGACAA |
| | | GAAGGAGGAGGACAAGAAGTGA |
| 669 | PL2093 | MPKKKRKVYPYDVPDYAKDGKKDKKEEDKKKDGKKDKKEEDKKGSRALVVIRLSRVTDA |
| | _AA | TTSPERQLESCQQLCAQRGWDVVGVAEDLDVSGAVDPFDRKRRPNLARWLAFEEQPFDV |
| | | IVAYRVDRLTRSIRHLQQLVHWAEDHKKLVVSATEAHFDTTTPFAAVVIALMGTVAQME |
| | | LEAIKERNRSAAHFNIRAGKYRGSLPPWGYLPTRVDGEWRLVPDPVQRERILEVYHRWD |
| | | NHEPLHLVAHDLNRRGVLSPKDYFAQLQGREPQGREWSATALKRSMISEAMLGYATLNG |
| | | KTVRDDDGAPLVRAEPILTREQLEALRAELVKTSRAKPAVSTPSLLLRVLFCAVCGEPA |
| | | YKFAGGGRKHPRYRCRSMGFPKHCGNGTVAMAEWDAFCEEQVLDLLGDAERLEKVWVAG |
| | | SDSAVELAEVNAELVDLTSLIGSPAYRAGSPQREALDARIAALAARQEELEGLEARPSG |
| | | WEWRETGQRFGDWWREQDTAAKNTWLRSMNVRLTFDVRGGLTRTIDFGDLQEYEQHLRL |
| | | GSVVERLHTGMS* |
| 670 | PL2093_ | ATGCCCAAGAAGAAGAGAAAGGTGTACCCCTACGACGTGCCCGACTACGCCAAGGACGG |
| | DNA | CAAGAAGGACAAGAAGGAGGAGGACAAGAAGAAGGACGGCAAGAAGGACAAGAAGGAGG |
| | | AGGACAAGAAGGGCAGCAGAGCCCTGGTGGTGATCAGACTGAGCAGAGTGACCGACGCC |
| | | ACCACCAGCCCCGAGAGACAGCTGGAGAGCTGCCAGCAGCTGTGCGCCCAGAGAGGCTG |
| | | GGACGTGGTGGGCGTGGCCGAGGACCTGGACGTGAGCGGCGCCGTGGACCCCTTCGACA |
| | | GAAAGAGAAGACCCAACCTGGCCAGATGGCTGGCCTTCGAGGAGCAGCCCTTCGACGTG |
| | | ATCGTGGCCTACAGAGTGGACAGACTGACCAGAAGCATCAGACACCTGCAGCAGCTGGT |
| | | GCACTGGGCCGAGGACCACAAGAAGCTGGTGGTGAGCGCCACCGAGGCCCACTTCGACA |
| | | CCACCACCCCCTTCGCCGCCGTGGTGATCGCCCTGATGGGCACCGTGGCCCAGATGGAG |
| | | CTGGAGGCCATCAAGGAGAGAAACAGAAGCGCCGCCCACTTCAACATCAGAGCCGGCAA |
| | | GTACAGAGGCAGCCTGCCCCCCTGGGGCTACCTGCCCACCAGAGTGGACGGCGAGTGGA |
| | | GACTGGTGCCCGACCCCGTGCAGAGAGAGAGAATCCTGGAGGTGTACCACAGAGTGGTG |
| | | GACAACCACGAGCCCCTGCACCTGGTGGCCCACGACCTGAACAGAAGAGGCGTGCTGAG |
| | | CCCCAAGGACTACTTCGCCCAGCTGCAGGGCAGAGAGCCCCAGGGCAGAGAGTGGAGCG |
| | | CCACCGCCCTGAAGAGAAGCATGATCAGCGAGGCCATGCTGGGCTACGCCACCCTGAAC |
| | | GGCAAGACCGTGAGAGACGACGACGGCGCCCCCCTGGTGAGAGCCGAGCCCATCCTGAC |
| | | CAGAGAGCAGCTGGAGGCCCTGAGAGCCGAGCTGGTGAAGACCAGCAGAGCCAAGCCCG |
| | | CCGTGAGCACCCCCAGCCTGCTGCTGAGAGTGCTGTTCTGCGCCGTGTGCGGCGAGCCC |
| | | GCCTACAAGTTCGCCGGCGGCGGCAGAAAGCACCCCAGATACAGATGCAGAAGCATGGG |
| | | CTTCCCCAAGCACTGCGGCAACGGCACCGTGGCCATGGCCGAGTGGGACGCCTTCTGCG |
| | | AGGAGCAGGTGCTGGACCTGCTGGGCGACGCCGAGAGACTGGAGAAGGTGTGGGTGGCC |
| | | GGCAGCGACAGCGCCGTGGAGCTGGCCGAGGTGAACGCCGAGCTGGTGGACCTGACCAG |
| | | CCTGATCGGCAGCCCCGCCTACAGAGCCGGCAGCCCCCAGAGAGAGGCCCTGGACGCCA |
| | | GAATCGCCGCCCTGGCCGCCAGACAGGAGGAGCTGGAGGGCCTGGAGGCCAGACCCAGC |
| | | GGCTGGGAGTGGAGAGAGACCGGCCAGAGATTCGGCGACTGGTGGAGAGAGCAGGACAC |
| | | CGCCGCCAAGAACACCTGGCTGAGAAGCATGAACGTGAGACTGACCTTCGACGTGAGAG |
| | | GCGGCCTGACCAGAACCATCGACTTCGGCGACCTGCAGGAGTACGAGCAGCACCTGAGA |
| | | CTGGGCAGCGTGGTGGAGAGACTGCACACCGGCATGAGCTGA |
| 671 | PL2094 | MPKKKRKVYPYDVPDYAKDGKKDKKEEDKKKDGKKDKKEEDKKGSRALVVIRLSRVTDA |
| | _AA | TTSPERQLESCQQLCAQRGWDVVGVAEDLDVSGAVDPFDRKRRPNLARWLAFEEQPFDV |
| | | IVAYRVDRLTRSIRHLQQLVHWAEDHKKLVVSATEAHFDTTTPFAAVVIALMGTVAQME |
| | | LEAIKERNRSAAHFNIRAGKYRGSLPPWGYLPTRVDGEWRLVPDPVQRERILEVYHRWD |
| | | NHEPLHLVAHDLNRRGVLSPKDYFAQLQGREPQGREWSATALKRSMISEAMLGYATLNG |
| | | KTVRDDDGAPLVRAEPILTREQLEALRAELVKTSRAKPAVSTPSLLLRVLFCAVCGEPA |
| | | YKFAGGGRKHPRYRCRSMGFPKHCGNGTVAMAEWDAFCEEQVLDLLGDAERLEKVWVAG |
| | | SDSAVELAEVNAELVDLTSLIGSPAYRAGSPQREALDARIAALAARQEELEGLEARPSG |
| | | WEWRETGQRFGDWWREQDTAAKNTWLRSMNVRLTFDVRGGLTRTIDFGDLQEYEQHLRL |
| | | GSVVERLHTGMSGSGKDGKKDKKEEDKK* |
| 672 | PL2094_ | ATGCCCAAGAAGAAGAGAAAGGTGTACCCCTACGACGTGCCCGACTACGCCAAGGACGG |
| | DNA | CAAGAAGGACAAGAAGGAGGAGGACAAGAAGAAGGACGGCAAGAAGGACAAGAAGGAGG |
| | | AGGACAAGAAGGGCAGCAGAGCCCTGGTGGTGATCAGACTGAGCAGAGTGACCGACGCC |
| | | ACCACCAGCCCCGAGAGACAGCTGGAGAGCTGCCAGCAGCTGTGCGCCCAGAGAGGCTG |
| | | GGACGTGGTGGGCGTGGCCGAGGACCTGGACGTGAGCGGCGCCGTGGACCCCTTCGACA |
| | | GAAAGAGAAGACCCAACCTGGCCAGATGGCTGGCCTTCGAGGAGCAGCCCTTCGACGTG |
| | | ATCGTGGCCTACAGAGTGGACAGACTGACCAGAAGCATCAGACACCTGCAGCAGCTGGT |
| | | GCACTGGGCCGAGGACCACAAGAAGCTGGTGGTGAGCGCCACCGAGGCCCACTTCGACA |
| | | CCACCACCCCCTTCGCCGCCGTGGTGATCGCCCTGATGGGCACCGTGGCCCAGATGGAG |
| | | CTGGAGGCCATCAAGGAGAGAAACAGAAGCGCCGCCCACTTCAACATCAGAGCCGGCAA |
| | | GTACAGAGGCAGCCTGCCCCCCTGGGGCTACCTGCCCACCAGAGTGGACGGCGAGTGGA |
| | | GACTGGTGCCCGACCCCGTGCAGAGAGAGAGAATCCTGGAGGTGTACCACAGAGTGGTG |
| | | GACAACCACGAGCCCCTGCACCTGGTGGCCCACGACCTGAACAGAAGAGGCGTGCTGAG |
| | | CCCCAAGGACTACTTCGCCCAGCTGCAGGGCAGAGAGCCCCAGGGCAGAGAGTGGAGCG |
| | | CCACCGCCCTGAAGAGAAGCATGATCAGCGAGGCCATGCTGGGCTACGCCACCCTGAAC |
| | | GGCAAGACCGTGAGAGACGACGACGGCGCCCCCCTGGTGAGAGCCGAGCCCATCCTGAC |
| | | CAGAGAGCAGCTGGAGGCCCTGAGAGCCGAGCTGGTGAAGACCAGCAGAGCCAAGCCCG |
| | | CCGTGAGCACCCCCAGCCTGCTGCTGAGAGTGCTGTTCTGCGCCGTGTGCGGCGAGCCC |
| | | GCCTACAAGTTCGCCGGCGGCGGCAGAAAGCACCCCAGATACAGATGCAGAAGCATGGG |
| | | CTTCCCCAAGCACTGCGGCAACGGCACCGTGGCCATGGCCGAGTGGGACGCCTTCTGCG |
| | | AGGAGCAGGTGCTGGACCTGCTGGGCGACGCCGAGAGACTGGAGAAGGTGTGGGTGGCC |
| | | GGCAGCGACAGCGCCGTGGAGCTGGCCGAGGTGAACGCCGAGCTGGTGGACCTGACCAG |
| | | CCTGATCGGCAGCCCCGCCTACAGAGCCGGCAGCCCCCAGAGAGAGGCCCTGGACGCCA |
| | | GAATCGCCGCCCTGGCCGCCAGACAGGAGGAGCTGGAGGGCCTGGAGGCCAGACCCAGC |
| | | GGCTGGGAGTGGAGAGAGACCGGCCAGAGATTCGGCGACTGGTGGAGAGAGCAGGACAC |
| | | CGCCGCCAAGAACACCTGGCTGAGAAGCATGAACGTGAGACTGACCTTCGACGTGAGAG |
| | | GCGGCCTGACCAGAACCATCGACTTCGGCGACCTGCAGGAGTACGAGCAGCACCTGAGA |
| | | CTGGGCAGCGTGGTGGAGAGACTGCACACCGGCATGAGCGGCAGCGGCAAGGACGGCAA |
| | | GAAGGACAAGAAGGAGGAGGACAAGAAGTGA |
| 673 | PL2095 | MPKKKRKVYPYDVPDYAKDGKKDKKEEDKKKDGKKDKKEEDKKGSRALVVIRLSRVTDA |
| | _AA | TTSPERQLESCQQLCAQRGWDVVGVAEDLDVSGAVDPFDRKRRPNLARWLAFEEQPFDV |
| | | IVAYRVDRLTRSIRHLQQLVHWAEDHKKLVVSATEAHFDTTTPFAAVVIALMGTVAQME |
| | | LEAIKERNRSAAHFNIRAGKYRGSLPPWGYLPTRVDGEWRLVPDPVQRERILEVYHRWD |
| | | NHEPLHLVAHDLNRRGVLSPKDYFAQLQGREPQGREWSATALKRSMISEAMLGYATLNG |
| | | KTVRDDDGAPLVRAEPILTREQLEALRAELVKTSRAKPAVSTPSLLLRVLFCAVCGEPA |
| | | YKFAGGGRKHPRYRCRSMGFPKHCGNGTVAMAEWDAFCEEQVLDLLGDAERLEKVWVAG |
| | | SDSAVELAEVNAELVDLTSLIGSPAYRAGSPQREALDARIAALAARQEELEGLEARPSG |
| | | WEWRETGQRFGDWWREQDTAAKNTWLRSMNVRLTFDVRGGLTRTIDFGDLQEYEQHLRL |
| | | GSVVERLHTGMSGSGKDGKKDKKEEDKKKDGKKDKKEEDKK* |
| 674 | PL2095_ | ATGCCCAAGAAGAAGAGAAAGGTGTACCCCTACGACGTGCCCGACTACGCCAAGGACGG |
| | DNA | CAAGAAGGACAAGAAGGAGGAGGACAAGAAGAAGGACGGCAAGAAGGACAAGAAGGAGG |
| | | AGGACAAGAAGGGCAGCAGAGCCCTGGTGGTGATCAGACTGAGCAGAGTGACCGACGCC |
| | | ACCACCAGCCCCGAGAGACAGCTGGAGAGCTGCCAGCAGCTGTGCGCCCAGAGAGGCTG |
| | | GGACGTGGTGGGCGTGGCCGAGGACCTGGACGTGAGCGGCGCCGTGGACCCCTTCGACA |
| | | GAAAGAGAAGACCCAACCTGGCCAGATGGCTGGCCTTCGAGGAGCAGCCCTTCGACGTG |
| | | ATCGTGGCCTACAGAGTGGACAGACTGACCAGAAGCATCAGACACCTGCAGCAGCTGGT |
| | | GCACTGGGCCGAGGACCACAAGAAGCTGGTGGTGAGCGCCACCGAGGCCCACTTCGACA |
| | | CCACCACCCCCTTCGCCGCCGTGGTGATCGCCCTGATGGGCACCGTGGCCCAGATGGAG |
| | | CTGGAGGCCATCAAGGAGAGAAACAGAAGCGCCGCCCACTTCAACATCAGAGCCGGCAA |
| | | GTACAGAGGCAGCCTGCCCCCCTGGGGCTACCTGCCCACCAGAGTGGACGGCGAGTGGA |
| | | GACTGGTGCCCGACCCCGTGCAGAGAGAGAGAATCCTGGAGGTGTACCACAGAGTGGTG |
| | | GACAACCACGAGCCCCTGCACCTGGTGGCCCACGACCTGAACAGAAGAGGCGTGCTGAG |
| | | CCCCAAGGACTACTTCGCCCAGCTGCAGGGCAGAGAGCCCCAGGGCAGAGAGTGGAGCG |
| | | CCACCGCCCTGAAGAGAAGCATGATCAGCGAGGCCATGCTGGGCTACGCCACCCTGAAC |
| | | GGCAAGACCGTGAGAGACGACGACGGCGCCCCCCTGGTGAGAGCCGAGCCCATCCTGAC |
| | | CAGAGAGCAGCTGGAGGCCCTGAGAGCCGAGCTGGTGAAGACCAGCAGAGCCAAGCCCG |
| | | CCGTGAGCACCCCCAGCCTGCTGCTGAGAGTGCTGTTCTGCGCCGTGTGCGGCGAGCCC |
| | | GCCTACAAGTTCGCCGGCGGCGGCAGAAAGCACCCCAGATACAGATGCAGAAGCATGGG |
| | | CTTCCCCAAGCACTGCGGCAACGGCACCGTGGCCATGGCCGAGTGGGACGCCTTCTGCG |
| | | AGGAGCAGGTGCTGGACCTGCTGGGCGACGCCGAGAGACTGGAGAAGGTGTGGGTGGCC |
| | | GGCAGCGACAGCGCCGTGGAGCTGGCCGAGGTGAACGCCGAGCTGGTGGACCTGACCAG |
| | | CCTGATCGGCAGCCCCGCCTACAGAGCCGGCAGCCCCCAGAGAGAGGCCCTGGACGCCA |
| | | GAATCGCCGCCCTGGCCGCCAGACAGGAGGAGCTGGAGGGCCTGGAGGCCAGACCCAGC |
| | | GGCTGGGAGTGGAGAGAGACCGGCCAGAGATTCGGCGACTGGTGGAGAGAGCAGGACAC |
| | | CGCCGCCAAGAACACCTGGCTGAGAAGCATGAACGTGAGACTGACCTTCGACGTGAGAG |
| | | GCGGCCTGACCAGAACCATCGACTTCGGCGACCTGCAGGAGTACGAGCAGCACCTGAGA |
| | | CTGGGCAGCGTGGTGGAGAGACTGCACACCGGCATGAGCGGCAGCGGCAAGGACGGCAA |
| | | GAAGGACAAGAAGGAGGAGGACAAGAAGAAGGACGGCAAGAAGGACAAGAAGGAGGAGG |
| | | ACAAGAAGTGA |
| 675 | PL2096 | MPKKKRKVKDGKKDKKEEDKKKDGKKDKKEEDKKGSRALVVIRLSRVTDATTSPERQLE |
| | _AA | SCQQLCAQRGWDWVGVAEDLDVSGAVDPFDRKRRPNLARWLAFEEQPFDVIVAYRVDRL |
| | | TRSIRHLQQLVHWAEDHKKLVVSATEAHFDTTTPFAAVVIALMGTVAQMELEAIKERNR |
| | | SAAHFNIRAGKYRGSLPPWGYLPTRVDGEWRLVPDPVQRERILEVYHRVVDNHEPLHLV |
| | | AHDLNRRGVLSPKDYFAQLQGREPQGREWSATALKRSMISEAMLGYATLNGKTVRDDDG |
| | | APLVRAEPILTREQLEALRAELVKTSRAKPAVSTPSLLLRVLFCAVCGEPAYKFAGGGR |
| | | KHPRYRCRSMGFPKHCGNGTVAMAEWDAFCEEQVLDLLGDAERLEKVWVAGSDSAVELA |
| | | EVNAELVDLTSLIGSPAYRAGSPQREALDARIAALAARQEELEGLEARPSGWEWRETGQ |
| | | RFGDWWREQDTAAKNTWLRSMNVRLTFDVRGGLTRTIDFGDLQEYEQHLRLGSVVERLH |
| | | TGMSGSGKDGKKDKKEEDKKKDGKKDKKEEDKK* |
| 676 | PL2096_ | ATGCCCAAGAAGAAGAGAAAGGTGAAGGACGGCAAGAAGGACAAGAAGGAGGAGGACAA |
| | DNA | GAAGAAGGACGGCAAGAAGGACAAGAAGGAGGAGGACAAGAAGGGCAGCAGAGCCCTGG |
| | | TGGTGATCAGACTGAGCAGAGTGACCGACGCCACCACCAGCCCCGAGAGACAGCTGGAG |
| | | AGCTGCCAGCAGCTGTGCGCCCAGAGAGGCTGGGACGTGGTGGGCGTGGCCGAGGACCT |
| | | GGACGTGAGCGGCGCCGTGGACCCCTTCGACAGAAAGAGAAGACCCAACCTGGCCAGAT |
| | | GGCTGGCCTTCGAGGAGCAGCCCTTCGACGTGATCGTGGCCTACAGAGTGGACAGACTG |
| | | ACCAGAAGCATCAGACACCTGCAGCAGCTGGTGCACTGGGCCGAGGACCACAAGAAGCT |
| | | GGTGGTGAGCGCCACCGAGGCCCACTTCGACACCACCACCCCCTTCGCCGCCGTGGTGA |
| | | TCGCCCTGATGGGCACCGTGGCCCAGATGGAGCTGGAGGCCATCAAGGAGAGAAACAGA |
| | | AGCGCCGCCCACTTCAACATCAGAGCCGGCAAGTACAGAGGCAGCCTGCCCCCCTGGGG |
| | | CTACCTGCCCACCAGAGTGGACGGCGAGTGGAGACTGGTGCCCGACCCCGTGCAGAGAG |
| | | AGAGAATCCTGGAGGTGTACCACAGAGTGGTGGACAACCACGAGCCCCTGCACCTGGTG |
| | | GCCCACGACCTGAACAGAAGAGGCGTGCTGAGCCCCAAGGACTACTTCGCCCAGCTGCA |
| | | GGGCAGAGAGCCCCAGGGCAGAGAGTGGAGCGCCACCGCCCTGAAGAGAAGCATGATCA |
| | | GCGAGGCCATGCTGGGCTACGCCACCCTGAACGGCAAGACCGTGAGAGACGACGACGGC |
| | | GCCCCCCTGGTGAGAGCCGAGCCCATCCTGACCAGAGAGCAGCTGGAGGCCCTGAGAGC |
| | | CGAGCTGGTGAAGACCAGCAGAGCCAAGCCCGCCGTGAGCACCCCCAGCCTGCTGCTGA |
| | | GAGTGCTGTTCTGCGCCGTGTGCGGCGAGCCCGCCTACAAGTTCGCCGGCGGCGGCAGA |
| | | AAGCACCCCAGATACAGATGCAGAAGCATGGGCTTCCCCAAGCACTGCGGCAACGGCAC |
| | | CGTGGCCATGGCCGAGTGGGACGCCTTCTGCGAGGAGCAGGTGCTGGACCTGCTGGGCG |
| | | ACGCCGAGAGACTGGAGAAGGTGTGGGTGGCCGGCAGCGACAGCGCCGTGGAGCTGGCC |
| | | GAGGTGAACGCCGAGCTGGTGGACCTGACCAGCCTGATCGGCAGCCCCGCCTACAGAGC |
| | | CGGCAGCCCCCAGAGAGAGGCCCTGGACGCCAGAATCGCCGCCCTGGCCGCCAGACAGG |
| | | AGGAGCTGGAGGGCCTGGAGGCCAGACCCAGCGGCTGGGAGTGGAGAGAGACCGGCCAG |
| | | AGATTCGGCGACTGGTGGAGAGAGCAGGACACCGCCGCCAAGAACACCTGGCTGAGAAG |
| | | CATGAACGTGAGACTGACCTTCGACGTGAGAGGCGGCCTGACCAGAACCATCGACTTCG |
| | | GCGACCTGCAGGAGTACGAGCAGCACCTGAGACTGGGCAGCGTGGTGGAGAGACTGCAC |
| | | ACCGGCATGAGCGGCAGCGGCAAGGACGGCAAGAAGGACAAGAAGGAGGAGGACAAGAA |
| | | GAAGGACGGCAAGAAGGACAAGAAGGAGGAGGACAAGAAGTGA |

### 9. EQUIVALENTS AND INCORPORATION BY REFERENCE

[0813] All references cited herein are incorporated by reference to the same extent as if each individual publication, database entry (e.g. Genbank sequences or GeneID entries), patent application, or patent, was specifically and individually indicated incorporated by reference in its entirety, for all purposes. This statement of incorporation by reference is intended by Applicants, pursuant to 37 C.F.R. § 1.57(b)(1), to relate to each and every individual publication, database entry (e.g. Genbank sequences or GeneID entries), patent application, or patent, each of which is clearly identified in compliance with 37 C.F.R. § 1.57(b)(2), even if such citation is not immediately adjacent to a dedicated statement of incorporation by reference. The inclusion of dedicated statements of incorporation by reference, if any, within the specification does not in any way weaken this general statement of incorporation by reference. Citation of the references herein is not intended as an admission that the reference is pertinent prior art, nor does it constitute any admission as to the contents or date of these publications or documents.

[0814] It is an object of the invention not to encompass within the invention any previously known product, process of making the product, or method of using the product such that Applicant reserves the right and hereby disclose a disclaimer of any previously known product, process, or method. It is further noted that the invention does not intend to encompass within the scope of the invention any product, process, or making of the product or method of using the product, which does not meet the written description and enablement requirements of the USPTO (35 U.S.C. 112(a)) or the EPO (Article 83 of the EPC), such that Applicant reserves the right and hereby disclose a disclaimer of any previously described product, process of making the product, or method of using the product. It may be advantageous in the practice of the invention to be in compliance with Art. 53(c) EPC and Rule 28(b) and (c) EPC. Nothing herein is to be construed as a promise. It is noted that in this disclosure and particularly in the claims and/or paragraphs, terms such as “comprises”, “comprised”, “comprising” and the like can have the meaning attributed to it in U.S. Patent law; e.g., they can mean “includes”, “included”, “including”, and the like; and that terms such as “consisting essentially of” and “consists essentially of” have the meaning ascribed to them in U.S. Patent law, e.g., they allow for elements not explicitly recited, but exclude elements that are found in the prior art or that affect a basic or novel characteristic of the invention.

[0815] While the invention has been particularly shown and described with reference to a preferred embodiment and various alternate embodiments, it is understood by persons skilled in the relevant art that various changes in form and details can be made therein without departing from the spirit and scope of the invention.

The application's sequence listing, which the Patent Office published only in electronic form, follows.

SEQUENCE LISTING (751 sequences)

SEQ ID NO: 1 - DNA, 19 bp, synthetic construct
  source 1..19: mol_type = other DNA
ttgagcgggcccccaccgt

SEQ ID NO: 2 - DNA, 21 bp, synthetic construct
  source 1..21: mol_type = other DNA
cagcgggctcagctgatagca

SEQ ID NO: 3 - DNA, 21 bp, synthetic construct
  source 1..21: mol_type = other DNA
cggatggctaaccaagcggcc

SEQ ID NO: 4 - DNA, 393 bp, synthetic construct
  source 1..393: mol_type = other DNA
atgactcactatcaggccttgcttttggacacggaccgggtccagttcggaccggtggtagccctgaacccggctacgctgctcccactgcctgaggaagggctgcaacacaactgccttgatgggacaggtggcggtggtgtcaccgtcaagttcaagtacaagggtgaggaacttgaagttgatattagcaaaatcaagaaggtttggcgcgttggtaaaatgatatcttttacttatgacgacaacggcaagacaggtagaggggcagtgtctgagaaagacgcccccaaggagctgttgcaaatgttggaaaagtctgggaaaaagtctggcggctcaaaaagaaccgccgacggcagcgaattcgagcccaagaagaagaggaaagtc

SEQ ID NO: 5 - DNA, 66 bp, synthetic construct
  source 1..66: mol_type = other DNA
ggaagcggagctactaacttcagcctgctgaagcaggctggcgacgtggaggagaaccctggacct

SEQ ID NO: 6 - DNA, 45 bp, synthetic construct
  source 1..45: mol_type = other DNA
gggggaggaggttctggaggcggaggctccggaggcggagggtca

SEQ ID NO: 7 - DNA, 15 bp, synthetic construct
  source 1..15: mol_type = other DNA
ggaggtggcgggagc

SEQ ID NO: 8 - DNA, 15 bp, synthetic construct
  source 1..15: mol_type = other DNA
cccgcaccagcgcct

SEQ ID NO: 9 - DNA, 45 bp, synthetic construct
  source 1..45: mol_type = other DNA
gaggcagctgccaaggaagccgctgccaaggaggcggccgcaaag

SEQ ID NO: 10 - DNA, 48 bp, synthetic construct
  source 1..48: mol_type = other DNA
agtgggagcgagacccctgggactagcgagtcagctacacccgaaagc

SEQ ID NO: 11 - DNA, 54 bp, synthetic construct
  source 1..54: mol_type = other DNA
ggggggtcaggtggatccggcggaagtggcggatccggtggatctggcggcagt

SEQ ID NO: 12 - DNA, 15 bp, synthetic construct
  source 1..15: mol_type = other DNA
gaagctgctgctaag

SEQ ID NO: 13 - protein, 22 aa, synthetic construct
GSGATNFSLLKQAGDVEENPGP

SEQ ID NO: 14 - protein, 15 aa, synthetic construct
GGGGSGGGGSGGGGS

SEQ ID NO: 15 - protein, 5 aa, synthetic construct
GGGGS

SEQ ID NO: 16 - protein, 5 aa, synthetic construct
PAPAP

SEQ ID NO: 17 - protein, 15 aa, synthetic construct
EAAAKEAAAKEAAAK

SEQ ID NO: 18 - protein, 16 aa, synthetic construct
SGSETPGTSESATPES

SEQ ID NO: 19 - protein, 18 aa, synthetic construct
GGSGGSGGSGGSGGSGGS

SEQ ID NO: 20 - protein, 5 aa, synthetic construct
EAAAK

SEQ ID NO: 21 - protein, 1363 aa, Streptococcus pyogenes
MDKKYSIGLDIGTNSVGWAVITDEYKVPSKKFKVLGNTDRHSIKKNLIGALLFDSGETAEATRLKRTARRRYTRRKNRICYLQEIFSNEMAKVDDSFFHRLEESFLVEEDKKHERHPIFGNIVDEVAYHEKYPTIYHLRKKLVDSTDKADLRLIYLALAHMIKFRGHFLIEGDLNPDNSDVDKLFIQLVQTYNQLFEENPINASGVDAKAILSARLSKSRRLENLIAQLPGEKKNGLFGNLIALSLGLTPNFKSNFDLAEDAKLQLSKDTYDDDLDNLLAQIGDQYADLFLAAKNLSDAILLSDILRVNTEITKAPLSASMIKRYDEHHQDLTLLKALVRQQLPEKYKEIFFDQSKNGYAGYIDGGASQEEFYKFIKPILEKMDGTEELLVKLNREDLLRKQRTFDNGSIPHQIHLGELHAILRRQEDFYPFLKDNREKIEKILTFRIPYYVGPLARGNSRFAWMTRKSEETITPWNFEEVVDKGASAQSFIERMTNFDKNLPNEKVLPKHSLLYEYFTVYNELTKVKYVTEGMRKPAFLSGEQKKAIVDLLFKTNRKVTVKQLKEDYFKKIECFDSVEISGVEDRFNASLGTYHDLLKIIKDKDFLDNEENEDILEDIVLTLTLFEDREMIEERLKTYAHLFDDKVMKQLKRRRYTGWGRLSRKLINGIRDKQSGKTILDFLKSDGFANRNFMQLIHDDSLTFKEDIQKAQVSGQGDSLHEHIANLAGSPAIKKGILQTVKVVDELVKVMGRHKPENIVIEMARENQTTQKGQKNSRERMKRIEEGIKELGSQILKEHPVENTQLQNEKLYLYYLQNGRDMYVDQELDINRLSDYDVDHIVPQSFLKDDSIDNKVLTRSDKNRGKSDNVPSEEVVKKMKNYWRQLLNAKLITQRKFDNLTKAERGGLSELDKAGFIKRQLVETRQITKHVAQILDSRMNTKYDENDKLIREVKVITLKSKLVSDFRKDFQFYKVREINNYHHAHDAYLNAVVGTALIKKYPKLESEFVYGDYKVYDVRKMIAKSEQEIGKATAKYFFYSNIMNFFKTEITLANGEIRKRPLIETNGETGEIVWDKGRDFATVRKVLSMPQVNIVKKTEVQTGGFSKESILPKRNSDKLIARKKDWDPKKYGGFDSPTVAYSVLVVAKVEKGKSKKLKSVKELLGITIMERSSFEKNPIDFLEAKGYKEVKKDLIIKLPKYSLFELENGRKRMLASAGELQKGNELALPSKYVNFLYLASHYEKLKGSPEDNEQKQLFVEQHKHYLDEIIEQISEFSKRVILADANLDKVLSAYNKHRDKPIREQAENIIHLFTLTNLGAPAAFKYFDTTIDRKRYTSTKEVLDATLIHQSITGLYETRIDLS

SEQ ID NO: 22 - protein, 1053 aa, Staphylococcus aureus
MKRNYILGLDIGITSVGYGIIDYETRDVIDAGVRLFKEANVENNEGRRSKRGARRLKRRRRHRIQRVKKLLFDYNLLTDHSELSGINPYEARVKGLSQKLSEEEFSAALLHLAKRRGVHNVNEVEEDTGNELSTKEQISRNSKALEEKYVAELQLERLKKDGEVRGSINRFKTSDYVKEAKQLLKVQKAYHQLDQSFIDTYIDLLETRRTYYEGPGEGSPFGWKDIKEWYEMLMGHCTYFPEELRSVKYAYNADLYNALNDLNNLVITRDENEKLEYYEKFQIIENVFKQKKKPTLKQIAKEILVNEEDIKGYRVTSTGKPEFTNLKVYHDIKDITARKEIIENAELLDQIAKILTIYQSSEDIQEELTNLNSELTQEEIEQISNLKGYTGTHNLSLKAINLILDELWHTNDNQIAIFNRLKLVPKKVDLSQQKEIPTTLVDDFILSPVVKRSFIQSIKVINAIIKKYGLPNDIIIELAREKNSKDAQKMINEMQKRNRQTNERIEEIIRTTGKENAKYLIEKIKLHDMQEGKCLYSLEAIPLEDLLNNPFNYEVDHIIPRSVSFDNSFNNKVLVKQEENSKKGNRTPFQYLSSSDSKISYETFKKHILNLAKGKGRISKTKKEYLLEERDINRFSVQKDFINRNLVDTRYATRGLMNLLRSYFRVNNLDVKVKSINGGFTSFLRRKWKFKKERNKGYKHHAEDALIIANADFIFKEWKKLDKAKKVMENQMFEEKQAESMPEIETEQEYKEIFITPHQIKHIKDFKDYKYSHRVDKKPNRELINDTLYSTRKDDKGNTLIVNNLNGLYDKDNDKLKKLINKSPEKLLMYHHDPQTYQKLKLIMEQYGDEKNPLYKYYEETGNYLTKYSKKDNGPVIKKIKYYGNKLNAHLDITDDYPNSRNKVVKLSLKPYRFDVYLDNGVYKFVTVKNLDVIKKENYYEVNSKCYEEAKKLKKISNQAEFIASFYNNDLIKINGELYRVIGVNNDLLNRIEVNMIDITYREYLENMNDKRPPRIIKTIASKTQSIKKYSTDILGNLYEVKSKKHPQIIKKG

SEQ ID NO: 23 - protein, 984 aa, Campylobacter jejuni
  source 1..984: note = Campylobacter jejuni subsp. jejuni
MARILAFDIGISSIGWAFSENDELKDCGVRIFTKVENPKTGESLALPRRLARSARKRLARRKARLNHLKHLIANEFKLNYEDYQSFDESLAKAYKGSLISPYELRFRALNELLSKQDFARVILHIAKRRGYDDIKNSDDKEKGAILKAIKQNEEKLANYQSVGEYLYKEYFQKFKENSKEFTNVRNKKESYERCIAQSFLKDELKLIFKKQREFGFSFSKKFEEEVLSVAFYKRALKDFSHLVGNCSFFTDEKRAPKNSPLAFMFVALTRIINLLNNLKNTEGILYTKDDLNALLNEVLKNGTLTYKQTKKLLGLSDDYEFKGEKGTYFIEFKKYKEFIKALGEHNLSQDDLNEIAKDITLIKDEIKLKKALAKYDLNQNQIDSLSKLEFKDHLNISFKALKLVTPLMLEGKKYDEACNELNLKVAINEDKKDFLPAFNETYYKDEVTNPVVLRAIKEYRKVLNALLKKYGKVHKINIELAREVGKNHSQRAKIEKEQNENYKAKKDAELECEKLGLKINSKNILKLRLFKEQKEFCAYSGEKIKISDLQDEKMLEIDHIYPYSRSFDDSYMNKVLVFTKQNQEKLNQTPFEAFGNDSAKWQKIEVLAKNLPTKKQKRILDKNYKDKEQKNFKDRNLNDTRYIARLVLNYTKDYLDFLPLSDDENTKLNDTQKGSKVHVEAKSGMLTSALRHTWGFSAKDRNNHLHHAIDAVIIAYANNSIVKAFSDFKKEQESNSAELYAKKISELDYKNKRKFFEPFSGFRQKVLDKIDEIFVSKPERKKPSGALHEETFRKEEEFYQSYGGKEGVLKALELGKIRKVNGKIVKNGDMFRVDIFKHKKTNKFYAVPIYTMDFALKVLPNKAVARSKKGEIKDWILMDENYEFCFSLYKDSLILIQTKDMQEPEFVYYNAFTSSTVSLIVSKHDNKFETLSKNQKILFKNANEKEVIAKSIGIQNLKVFEKYIVSALGEVTKAEFRQREDFKK

SEQ ID NO: 24 - protein, 1121 aa, Streptococcus thermophilus
MSDLVLGLDIGIGSVGVGILNKVTGEIIHKNSRIFPAAQAENNLVRRTNRQGRRLARRKKHRRVRLNRLFEESGLITDFTKISINLNPYQLRVKGLTDELSNEELFIALKNMVKHRGISYLDDASDDGNSSVGDYAQIVKENSKQLETKTPGQIQLERYQTYGQLRGDFTVEKDGKKHRLINVFPTSAYRSEALRILQTQQEFNPQITDEFINRYLEILTGKRKYYHGPGNEKSRTDYGRYRTSGETLDNIFGILIGKCTFYPDEFRAAKASYTAQEFNLLNDLNNLTVPTETKKLSKEQKNQIINYVKNEKAMGPAKLFKYIAKLLSCDVADIKGYRIDKSGKAEIHTFEAYRKMKTLETLDIEQMDRETLDKLAYVLTLNTEREGIQEALEHEFADGSFSQKQVDELVQFRKANSSIFGKGWHNFSVKLMMELIPELYETSEEQMTILTRLGKQKTTSSSNKTKYIDEKLLTEEIYNPVVAKSVRQAIKIVNAAIKEYGDFDNIVIEMARETNEDDEKKAIQKIQKANKDEKDAAMLKAANQYNGKAELPHSVFHGHKQLATKIRLWHQQGERCLYTGKTISIHDLINNSNQFEVDHILPLSITFDDSLANKVLVYATANQEKGQRTPYQALDSMDDAWSFRELKAFVRESKTLSNKKKEYLLTEEDISKFDVRKKFIERNLVDTRYASRVVLNALQEHFRAHKIDTKVSVVRGQFTSQLRRHWGIEKTRDTYHHHAVDALIIAASSQLNLWKKQKNTLVSYSEDQLLDIETGELISDDEYKESVFKAPYQHFVDTLKSKEFEDSILFSYQVDSKFNRKISDATIYATRQAKVGKDKADETYVLGKIKDIYTQDGYDAFMKIYKKDKSKFLMYRHDPQTFEKVIEPILENYPNKQINEKGKEVPCNPFLKYKEEHGYIRKYSKKGNGPEIKSLKYYDSKLGNHIDITPKDSNNKVVLQSVSPWRADVYFNKTTGKYEILGLKYADLQFEKGTGTYKISQEKYNDIKKKEGVDSDSEFKFTLYKNDLLLVKDTETKEQQLFRFLSRTMPKQKHYVELKPYDKQKFEGGEALIKVLGNVANSGQCKKGLGKSNISIYKVRTDVLGNQHIIKNEGDKPKLDF

SEQ ID NO: 25 - protein, 1037 aa, Parvibaculum lavamentivorans
MERIFGFDIGTTSIGFSVIDYSSTQSAGNIQRLGVRIFPEARDPDGTPLNQQRRQKRMMRRQLRRRRIRRKALNETLHEAGFLPAYGSADWPVVMADEPYELRRRGLEEGLSAYEFGRAIYHLAQHRHFKGRELEESDTPDPDVDDEKEAANERAATLKALKNEQTTLGAWLARRPPSDRKRGIHAHRNVVAEEFERLWEVQSKFHPALKSEEMRARISDTIFAQRPVFWRKNTLGECRFMPGEPLCPKGSWLSQQRRMLEKLNNLAIAGGNARPLDAEERDAILSKLQQQASMSWPGVRSALKALYKQRGEPGAEKSLKFNLELGGESKLLGNALEAKLADMFGPDWPAHPRKQEIRHAVHERLWAADYGETPDKKRVIILSEKDRKAHREAAANSFVADFGITGEQAAQLQALKLPTGWEPYSIPALNLFLAELEKGERFGALVNGPDWEGWRRTNFPHRNQPTGEILDKLPSPASKEERERISQLRNPTVVRTQNELRKVVNNLIGLYGKPDRIRIEVGRDVGKSKREREEIQSGIRRNEKQRKKATEDLIKNGIANPSRDDVEKWILWKEGQERCPYTGDQIGFNALFREGRYEVEHIWPRSRSFDNSPRNKTLCRKDVNIEKGNRMPFEAFGHDEDRWSAIQIRLQGMVSAKGGTGMSPGKVKRFLAKTMPEDFAARQLNDTRYAAKQILAQLKRLWPDMGPEAPVKVEAVTGQVTAQLRKLWTLNNILADDGEKTRADHRHHAIDALTVACTHPGMTNKLSRYWQLRDDPRAEKPALTPPWDTIRADAEKAVSEIVVSHRVRKKVSGPLHKETTYGDTGTDIKTKSGTYRQFVTRKKIESLSKGELDEIRDPRIKEIVAAHVAGRGGDPKKAFPPYPCVSPGGPEIRKVRLTSKQQLNLMAQTGNGYADLGSNHHIAIYRLPDGKADFEIVSLFDASRRLAQRNPIVQRTRADGASFVMSLAAGEAIMIPEGSKKGIWIVQGVWASGQVVLERDTDADHSTTTRPMPNPILKDDAKKVSIDPIGRVRPSND

SEQ ID NO: 26 - protein, 1084 aa, Corynebacterium diphtheriae
MKYHVGIDVGTFSVGLAAIEVDDAGMPIKTLSLVSHIHDSGLDPDEIKSAVTRLASSGIARRTRRLYRRKRRRLQQLDKFIQRQGWPVIELEDYSDPLYPWKVRAELAASYIADEKERGEKLSVALRHIARHRGWRNPYAKVSSLYLPDGPSDAFKAIREEIKRASGQPVPETATVGQMVTLCELGTLKLRGEGGVLSARLQQSDYAREIQEICRMQEIGQELYRKIIDVVFAAESPKGSASSRVGKDPLQPGKNRALKASDAFQRYRIAALIGNLRVRVDGEKRILSVEEKNLVFDHLVNLTPKKEPEWVTIAEILGIDRGQLIGTATMTDDGERAGARPPTHDTNRSIVNSRIAPLVDWWKTASALEQHAMVKALSNAEVDDFDSPEGAKVQAFFADLDDDVHAKLDSLHLPVGRAAYSEDTLVRLTRRMLSDGVDLYTARLQEFGIEPSWTPPTPRIGEPVGNPAVDRVLKTVSRWLESATKTWGAPERVIIEHVREGFVTEKRAREMDGDMRRRAARNAKLFQEMQEKLNVQGKPSRADLWRYQSVQRQNCQCAYCGSPITFSNSEMDHIVPRAGQGSTNTRENLVAVCHRCNQSKGNTPFAIWAKNTSIEGVSVKEAVERTRHWVTDTGMRSTDFKKFTKAVVERFQRATMDEEIDARSMESVAWMANELRSRVAQHFASHGTTVRVYRGSLTAEARRASGISGKLKFFDGVGKSRLDRRHHAIDAAVIAFTSDYVAETLAVRSNLKQSQAHRQEAPQWREFTGKDAEHRAAWRVWCQKMEKLSALLTEDLRDDRVVVMSNVRLRLGNGSAHKETIGKLSKVKLSSQLSVSDIDKASSEALWCALTREPGFDPKEGLPANPERHIRVNGTHVYAGDNIGLFPVSAGSIALRGGYAELGSSFHHARVYKITSGKKPAFAMLRVYTIDLLPYRNQDLFSVELKPQTMSMRQAEKKLRDALATGNAEYLGWLVVDDELVVDTSKIATDQVKAVEAELGTIRRWRVDGFFSPSKLRLRPLQMSKEGIKKESAPELSKIIDRPGWLPAVNKLFSDGNVTVVRRDSLGRVRLESTAHLPVTWKVQ

SEQ ID NO: 27 - protein, 1130 aa, Streptococcus sp.
  source 1..1130: note = Streptococcus pasteurianus
MTNGKILGLDIGIASVGVGIIEAKTGKVVHANSRLFSAANAENNAERRGFRGSRRLNRRKKHRVKRVRDLFEKYGIVTDFRNLNLNPYELRVKGLTEQLKNEELFAALRTISKRRGISYLDDAEDDSTGSTDYAKSIDENRRLLKNKTPGQIQLERLEKYGQLRGNFTVYDENGEAHRLINVFSTSDYEKEARKILETQADYNKKITAEFIDDYVEILTQKRKYYHGPGNEKSRTDYGRFRTDGTTLENIFGILIGKCNFYPDEYRASKASYTAQEYNFLNDLNNLKVSTETGKLSTEQKESLVEFAKNTATLGPAKLLKEIAKILDCKVDEIKGYREDDKGKPDLHTFEPYRKLKFNLESINIDDLSREVIDKLADILTLNTEREGIEDAIKRNLPNQFTEEQISEIIKVRKSQSTAFNKGWHSFSAKLMNELIPELYATSDEQMTILTRLEKFKVNKKSSKNTKTIDEKEVTDEIYNPVVAKSVRQTIKIINAAVKKYGDFDKIVIEMPRDKNADDEKKFIDKRNKENKKEKDDALKRAAYLYNSSDKLPDEVFHGNKQLETKIRLWYQQGERCLYSGKPISIQELVHNSNNFEIDHILPLSLSFDDSLANKVLVYAWTNQEKGQKTPYQVIDSMDAAWSFREMKDYVLKQKGLGKKKRDYLLTTENIDKIEVKKKFIERNLVDTRYASRVVLNSLQSALRELGKDTKVSVVRGQFTSQLRRKWKIDKSRETYHHHAVDALIIAASSQLKLWEKQDNPMFVDYGKNQVVDKQTGEILSVSDDEYKELVFQPPYQGFVNTISSKGFEDEILFSYQVDSKYNRKVSDATIYSTRKAKIGKDKKEETYVLGKIKDIYSQNGFDTFIKKYNKDKTQFLMYQKDSLTWENVIEVILRDYPTTKKSEDGKNDVKCNPFEEYRRENGLICKYSKKGKGTPIKSLKYYDKKLGNCIDITPEESRNKVILQSINPWRADVYFNPETLKYELMGLKYSDLSFEKGTGNYHISQEKYDAIKEKEGIGKKSEFKFTLYRNDLILIKDIASGEQEIYRFLSRTMPNVNHYVELKPYDKEKFDNVQELVEALGEADKVGRCIKGLNKPNISIYKVRTDVLGNKYFVKKKGDKPKLDFKNNKK

SEQ ID NO: 28 - protein, 1082 aa, Neisseria cinerea
MAAFKPNPMNYILGLDIGIASVGWAIVEIDEEENPIRLIDLGVRVFERAEVPKTGDSLAAARRLARSVRRLTRRRAHRLLRARRLLKREGVLQAADFDENGLIKSLPNTPWQLRAAALDRKLTPLEWSAVLLHLIKHRGYLSQRKNEGETADKELGALLKGVADNTHALQTGDFRTPAELALNKFEKESGHIRNQRGDYSHTFNRKDLQAELNLLFEKQKEFGNPHVSDGLKEGIETLLMTQRPALSGDAVQKMLGHCTFEPTEPKAAKNTYTAERFVWLTKLNNLRILEQGSERPLTDTERATLMDEPYRKSKLTYAQARKLLDLDDTAFFKGLRYGKDNAEASTLMEMKAYHAISRALEKEGLKDKKSPLNLSPELQDEIGTAFSLFKTDEDITGRLKDRVQPEILEALLKHISFDKFVQISLKALRRIVPLMEQGNRYDEACTEIYGDHYGKKNTEEKIYLPPIPADEIRNPVVLRALSQARKVINGVVRRYGSPARIHIETAREVGKSFKDRKEIEKRQEENRKDREKSAAKFREYFPNFVGEPKSKDILKLRLYEQQHGKCLYSGKEINLGRLNEKGYVEIDHALPFSRTWDDSFNNKVLALGSENQNKGNQTPYEYFNGKDNSREWQEFKARVETSRFPRSKKQRILLQKFDEDGFKERNLNDTRYINRFLCQFVADHMLLTGKGKRRVFASNGQITNLLRGFWGLRKVRAENDRHHALDAVVVACSTIAMQQKITRFVRYKEMNAFDGKTIDKETGEVLHQKAHFPQPWEFFAQEVMIRVFGKPDGKPEFEEADTPEKLRTLLAEKLSSRPEAVHKYVTPLFISRAPNRKMSGQGHMETVKSAKRLDEGISVLRVPLTQLKLKDLEKMVNREREPKLYEALKARLEAHKDDPAKAFAEPFYKYDKAGNRTQQVKAVRVEQVQKTGVWVHNHNGIADNATIVRVDVFEKGGKYYLVPIYSWQVAKGILPDRAVVQGKDEEDWTVMDDSFEFKFVLYANDLIKLTAKKNEFLGYFVSLNRATGAIDIRTHDTDSTKGKNGIFQSVGVKTALSFQKYQIDELGKEIRPCRLKKRPPVR

SEQ ID NO: 29 - protein, 1115 aa, unidentified
MSDLVLGLDIGIGSVGVGILNKVTGEIIHKNSRIFPAAQAENNLVRRTNRQGRRLARRKKHRRVRLNRLFEESGLITDFTKISINLNPYQLRVKGLTDELSNEELFIALKNMVKHRGISYLDDASDDGNSSVGDYAQIVKENSKQLETKTPGQIQLERYQTYGQLRGDFTVEKDGKKHRLINVFPTSAYRSEALRILQTQQEFNPQITDEFINRYLEILTGKRKYYHGPGNEKSRTDYGRYRTSGETLDNIFGILIGKCTFYPDEFRAAKASYTAQEFNLLNDLNNLTVPTETKKLSKEQKNQIINYVKNEKAMGPAKLFKYIAKLLSCDVADIKGYRIDKSGKAEIHTFEAYRKMKTLETLDIEQMDRETLDKLAYVLTLNTEREGIQEALEHEFADGSFSQKQVDELVQFRKANSSIFGKGWHNFSVKLMMELIPELYETSEEQMTILTRLGKQKTTSSSNKTKYIDEKLLTEEIYNPVVAKSVRQAIKIVNAAIKEYGDFDNIVIEMARENQTTQKGQKNSRERMKRIEEGIKELGSQILKEHPVENTQLQNEKLYLYYLQNGRDMYVDQELDINRLSDYDVDHIVPQSFLKDDSIDNKVLTRSDKNRGKSDNVPSEEVVKKMKNYWRQLLNAKLITQRKFDNLTKAERGGLSELDKAGFIKRQLVETRQITKHVAQILDSRMNTKYDENDKLIREVKVITLKSKLVSDFRKDFQFYKVREINNYHHAHDAYLNAVVGTALIKKYPKLESEFVYGDYKVYDVRKMIAKSEQEIGKATAKYFFYSNIMNFFKTEITLANGEIRKRPLIETNGETGEIVWDKGRDFATVRKVLSMPQVNIVKKTEVQTGGFSKESILPKRNSDKLIARKKDWDPKKYGGFDSPTVAYSVLVVAKVEKGKSKKLKSVKELLGITIMERSSFEKNPIDFLEAKGYKEVKKDLIIKLPKYSLFELENGRKRMLASAGELQKGNELALPSKYVNFLYLASHYEKLKGSPEDNEQKQLFVEQHKHYLDEIIEQISEFSKRVILADANLDKVLSAYNKHRDKPIREQAENIIHLFTLTNLGAPAAFKYFDTTIDRKRYTSTKEVLDATLIHQSITGLYETRIDLSQLGGD

SEQ ID NO: 30 - protein, 1003 aa, Campylobacter lari
MRILGFDIGINSIGWAFVENDELKDCGVRIFTKAENPKNKESLALPRRNARSSRRRLKRRKARLIAIKRILAKELKLNYKDYVAADGELPKAYEGSLASVYELRYKALTQNLETKDLARVILHIAKHRGYMNKNEKKSNDAKKGKILSALKNNALKLENYQSVGEYFYKEFFQKYKKNTKNFIKIRNTKDNYNNCVLSSDLEKELKLILEKQKEFGYNYSEDFINEILKVAFFQRPLKDFSHLVGACTFFEEEKRACKNSYSAWEFVALTKIINEIKSLEKISGEIVPTQTINEVLNLILDKGSITYKKFRSCINLHESISFKSLKYDKENAENAKLIDFRKLVEFKKALGVHSLSRQELDQISTHITLIKDNVKLKTVLEKYNLSNEQINNLLEIEFNDYINLSFKALGMILPLMREGKRYDEACEIANLKPKTVDEKKDFLPAFCDSIFAHELSNPVVNRAISEYRKVLNALLKKYGKVHKIHLELARDVGLSKKAREKIEKEQKENQAVNAWALKECENIGLKASAKNILKLKLWKEQKEICIYSGNKISIEHLKDEKALEVDHIYPYSRSFDDSFINKVLVFTKENQEKLNKTPFEAFGKNIEKWSKIQTLAQNLPYKKKNKILDENFKDKQQEDFISRNLNDTRYIATLIAKYTKEYLNFLLLSENENANLKSGEKGSKIHVQTISGMLTSVLRHTWGFDKKDRNNHLHHALDAIIVAYSTNSIIKAFSDFRKNQELLKARFYAKELTSDNYKHQVKFFEPFKSFREKILSKIDEIFVSKPPRKRARRALHKDTFHSENKIIDKCSYNSKEGLQIALSCGRVRKIGTKYVENDTIVRVDIFKKQNKFYAIPIYAMDFALGILPNKIVITGKDKNNNPKQWQTIDESYEFCFSLYKNDLILLQKKNMQEPEFAYYNDFSISTSSICVEKHDNKFENLTSNQKLLFSNAKEGSVKVESLGIQNLKVFEKYIITPLGDKIKADFQPRENISLKTSKKYGLR

SEQ ID NO: 31 - protein, 1374 aa, unidentified
MDKKYSIGLDIGTNSVGWAVITDEYKVPSKKFKVLGNTDRHSIKKNLIGALLFDSGETAEATRLKRTARRRYTRRKNRICYLQEIFSNEMAKVDDSFFHRLEESFLVEEDKKHERHPIFGNIVDEVAYHEKYPTIYHLRKKLVDSTDKADLRLIYLALAHMIKFRGHFLIEGDLNPDNSDVDKLFIQLVQTYNQLFEENPINASGVDAKAILSARLSKSRRLENLIAQLPGEKKNGLFGNLIALSLGLTPNFKSNFDLAEDAKLQLSKDTYDDDLDNLLAQIGDQYADLFLAAKNLSDAILLSDILRVNTEITKAPLSASMIKRYDEHHQDLTLLKALVRQQLPEKYKEIFFDQSKNGYAGYIDGGASQEEFYKFIKPILEKMDGTEELLVKLNREDLLRKQRTFDNGSIPHQIHLGELHAILRRQEDFYPFLKDNREKIEKILTFRIPYYVGPLARGNSRFAWMTRKSEETITPWNFEEVVDKGASAQSFIERMTNFDKNLPNEKVLPKHSLLYEYFTVYNELTKVKYVTEGMRKPAFLSGEQKKAIVDLLFKTNRKVTVKQLKEDYFKKIECFDSVEISGVEDRFNASLGTYHDLLKIIKDKDFLDNEENEDILEDIVLTLTLFEDREMIEERLKTYAHLFDDKVMKQLKRRRYTGWGRLSRKLINGIRDKQSGKTILDFLKSDGFANRNFMQLIHDDSLTFKEDIQKAQVSGQGDSLHEHIANLAGSPAIKKGILQTVKVVDELVKVMGRHKPENIVIEMARETNEDDEKKAIQKIQKANKDEKDAAMLKAANQYNGKAELPHSVFHGHKQLATKIRLWHQQGERCLYTGKTISIHDLINNSNQFEVDHILPLSITFDDSLANKVLVYATANQEKGQRTPYQALDSMDDAWSFRELKAFVRESKTLSNKKKEYLLTEEDISKFDVRKKFIERNLVDTRYASRVVLNALQEHFRAHKIDTKVSVVRGQFTSQLRRHWGIEKTRDTYHHHAVDALIIAASSQLNLWKKQKNTLVSYSEDQLLDIETGELISDDEYKESVFKAPYQHFVDTLKSKEFEDSILFSYQVDSKFNRKISDATIYATRQAKVGKDKADETYVLGKIKDIYTQDGYDAFMKIYKKDKSKFLMYRHDPQTFEKVIEPILENYPNKQINEKGKEVPCNPFLKYKEEHGYIRKYSKKGNGPEIKSLKYYDSKLGNHIDITPKDSNNKVVLQSVSPWRADVYFNKTTGKYEILGLKYADLQFEKGTGTYKISQEKYNDIKKKEGVDSDSEFKFTLYKNDLLLVKDTETKEQQLFRFLSRTMPKQKHYVELKPYDKQKFEGGEALIKVLGNVANSGQCKKGLGKSNISIYKVRTDVLGNQHIIKNEGDKPKLDF

SEQ ID NO: 32 - protein, 1368 aa, unidentified
MDKKYSIGLDIGTNSVGWAVITDEYKVPSKKFKVLGNTDRHSIKKNLIGALLFDSGETAEATRLKRTARRRYTRRKNRICYLQEIFSNEMAKVDDSFFHRLEESFLVEEDKKHERHPIFGNIVDEVAYHEKYPTIYHLRKKLVDSTDKADLRLIYLALAHMIKFRGHFLIEGDLNPDNSDVDKLFIQLVQTYNQLFEENPINASGVDAKAILSARLSKSRRLENLIAQLPGEKKNGLFGNLIALSLGLTPNFKSNFDLAEDAKLQLSKDTYDDDLDNLLAQIGDQYADLFLAAKNLSDAILLSDILRVNTEITKAPLSASMIKRYDEHHQDLTLLKALVRQQLPEKYKEIFFDQSKNGYAGYIDGGASQEEFYKFIKPILEKMDGTEELLVKLNREDLLRKQRTFDNGSIPHQIHLGELHAILRRQEDFYPFLKDNREKIEKILTFRIPYYVGPLARGNSRFAWMTRKSEETITPWNFEEVVDKGASAQSFIERMTNFDKNLPNEKVLPKHSLLYEYFTVYNELTKVKYVTEGMRKPAFLSGEQKKAIVDLLFKTNRKVTVKQLKEDYFKKIECFDSVEISGVEDRFNASLGTYHDLLKIIKDKDFLDNEENEDILEDIVLTLTLFEDREMIEERLKTYAHLFDDKVMKQLKRRRYTGWGRLSRKLINGIRDKQSGKTILDFLKSDGFANRNFMQLIHDDSLTFKEDIQKAQVSGQGDSLHEHIANLAGSPAIKKGILQTVKVVDELVKVMGRHKPENIVIAMARENQTTQKGQKNSRERMKRIEEGIKELGSQILKEHPVENTQLQNEKLYLYYLQNGRDMYVDQELDINRLSDYDVDAIVPQSFLKDDSIDAKVLTRSDKARGKSDNVPSEEVVKKMKNYWRQLLNAKLITQRKFDNLTKAERGGLSELDKAGFIKRQLVETRQITKHVAQILDSRMNTKYDENDKLIREVKVITLKSKLVSDFRKDFQFYKVREINNYHHAHAAYLNAVVGTALIKKYPKLESEFVYGDYKVYDVRKMIAKSEQEIGKATAKYFFYSNIMNFFKTEITLANGEIRKRPLIETNGETGEIVWDKGRDFATVRKVLSMPQVNIVKKTEVQTGGFSKESILPKRNSDKLIARKKDWDPKKYGGFDSPTVAYSVLVVAKVEKGKSKKLKSVKELLGITIMERSSFEKNPIDFLEAKGYKEVKKDLIIKLPKYSLFELENGRKRMLASAGELQKGNELALPSKYVNFLYLASHYEKLKGSPEDNEQKQLFVEQHKHYLDEIIEQISEFSKRVILADANLDKVLSAYNKHRDKPIREQAENIIHLFTLTNLGAPAAFKYFDTTIDRKRYTSTKEVLDATLIHQSITGLYETRIDLSQLGGD

SEQ ID NO: 33 - protein, 1422 aa, Sutterella wadsworthensis
MTQSERRFSCSIGIDMGAKYTGVFYALFDREELPTNLNSKAMTLVMPETGPRYVQAQRTAVRHRLRGQKRYTLARKLAFLVVDDMIKKQEKRLTDEEWKRGREALSGLLKRRGYSRPNADGEDLTPLENVRADVFAAHPAFSTYFSEVRSLAEQWEEFTANISNVEKFLGDPNIPADKEFIEFAVAEGLIDKTEKKAYQSALSTLRANANVLTGLRQMGHKPRSEYFKAIEADLKKDSRLAKINEAFGGAERLARLLGNLSNLQLRAERWYFNAPDIMKDRGWEPDRFKKTLVRAFKFFHPAKDQNKQHLELIKQIENSEDIIETLCTLDPNRTIPPYEDQNNRRPPLDQTLLLSPEKLTRQYGEIWKTWSARLTSAEPTLAPAAEILERSTDRKSRVAVNGHEPLPTLAYQLSYALQRAFDRSKALDPYALRALAAGSKSNKLTSARTALENCIGGQNVKTFLDCARRYYREADDAKVGLWFDNADGLLERSDLHPPMKKKILPLLVANILQTDETTGQKFLDEIWRKQIKGRETVASRCARIETVRKSFGGGFNIAYNTAQYREVNKLPRNAQDKELLTIRDRVAETADFIAANLGLSDEQKRKFANPFSLAQFYTLIETEVSGFSATTLAVHLENAWRMTIKDAVINGETVRAAQCSRLPAETARPFDGLVRRLVDRQAWEIAKRVSTDIQSKVDFSNGIVDVSIFVEENKFEFSASVADLKKNKRVKDKMLSEAEKLETRWLIKNERIKKASRGTCPYTGDRLAEGGEIDHILPRSLIKDARGIVFNAEPNLIYASSRGNQLKKNQRYSLSDLKANYRNEIFKTSNIAAITAEIEDVVTKLQQTHRLKFFDLLNEHEQDCVRHALFLDDGSEARDAVLELLATQRRTRVNGTQIWMIKNLANKIREELQNWCKTTNNRLHFQAAATNVSDAKNLRLKLAQNQPDFEKPDIQPIASHSIDALCSFAVGSADAERDQNGFDYLDGKTVLGLYPQSCEVIHLQAKPQEEKSHFDSVAIFKEGIYAEQFLPIFTLNEKIWIGYETLNAKGERCGAIEVSGKQPKELLEMLAPFFNKPVGDLSAHATYRILKKPAYEFLAKAALQPLSAEEKRLAALLDALRYCTSRKSLMSLFMAANGKSLKKREDVLKPKLFQLKVELKGEKSFKLNGSLTLPVKQDWLRICDSPELADAFGKPCSADELTSKLARIWKRPVMRDLAHAPVRREFSLPAIDNPSGGFRIRRTNLFGNELYQVHAINAKKYRGFASAGSNVDWSKGILFNELQHENLTECGGRFITSADVTPMSEWRKVVAEDNLSIWIAPGTEGRRYVRVETTFIQASHWFEQSVENWAITSPLSLPASFKVDKPAEFQKAVGTELSELLGQPRSEIFIENVGNAKHIRFWYIVVSSNKKMNESYNNVSKS

SEQ ID NO: 34 - protein, 1372 aa, Legionella pneumophila
  source 1..1372: note = Legionella pneumophila str. Paris
MESSQILSPIGIDLGGKFTGVCLSHLEAFAELPNHANTKYSVILIDHNNFQLSQAQRRATRHRVRNKKRNQFVKRVALQLFQHILSRDLNAKEETALCHYLNNRGYTYVDTDLDEYIKDETTINLLKELLPSESEHNFIDWFLQKMQSSEFRKILVSKVEEKKDDKELKNAVKNIKNFITGFEKNSVEGHRHRKVYFENIKSDITKDNQLDSIKKKIPSVCLSNLLGHLSNLQWKNLHRYLAKNPKQFDEQTFGNEFLRMLKNFRHLKGSQESLAVRNLIQQLEQSQDYISILEKTPPEITIPPYEARTNTGMEKDQSLLLNPEKLNNLYPNWRNLIPGIIDAHPFLEKDLEHTKLRDRKRIISPSKQDEKRDSYILQRYLDLNKKIDKFKIKKQLSFLGQGKQLPANLIETQKEMETHFNSSLVSVLIQIASAYNKEREDAAQGIWFDNAFSLCELSNINPPRKQKILPLLVGAILSEDFINNKDKWAKFKIFWNTHKIGRTSLKSKCKEIEEARKNSGNAFKIDYEEALNHPEHSNNKALIKIIQTIPDIIQAIQSHLGHNDSQALIYHNPFSLSQLYTILETKRDGFHKNCVAVTCENYWRSQKTEIDPEISYASRLPADSVRPFDGVLARMMQRLAYEIAMAKWEQIKHIPDNSSLLIPIYLEQNRFEFEESFKKIKGSSSDKTLEQAIEKQNIQWEEKFQRIINASMNICPYKGASIGGQGEIDHIYPRSLSKKHFGVIFNSEVNLIYCSSQGNREKKEEHYLLEHLSPLYLKHQFGTDNVSDIKNFISQNVANIKKYISFHLLTPEQQKAARHALFLDYDDEAFKTITKFLMSQQKARVNGTQKFLGKQIMEFLSTLADSKQLQLEFSIKQITAEEVHDHRELLSKQEPKLVKSRQQSFPSHAIDATLTMSIGLKEFPQFSQELDNSWFINHLMPDEVHLNPVRSKEKYNKPNISSTPLFKDSLYAERFIPVWVKGETFAIGFSEKDLFEIKPSNKEKLFTLLKTYSTKNPGESLQELQAKSKAKWLYFPINKTLALEFLHHYFHKEIVTPDDTTVCHFINSLRYYTKKESITVKILKEPMPVLSVKFESSKKNVLGSFKHTIALPATKDWERLFNHPNFLALKANPAPNPKEFNEFIRKYFLSDNNPNSDIPNNGHNIKPQKHKAVRKVFSLPVIPGNAGTMMRIRRKDNKGQPLYQLQTIDDTPSMGIQINEDRLVKQEVLMDAYKTRNLSTIDGINNSEGQAYATFDNWLTLPVSTFKPEIIKLEMKPHSKTRRYIRITQSLADFIKTIDEALMIKPSDSIDDPLNMPNEIVCKNKLFGNELKPRDGKMKIVSTGKIVTYEFESDSTPQWIQTLYVTQLKKQP

SEQ ID NO: 35 - protein, 1395 aa, Treponema denticola
MKKEIKDYFLGLDVGTGSVGWAVTDTDYKLLKANRKDLWGMRCFETAETAEVRRLHRGARRRIERRKKRIKLLQELFSQEIAKTDEGFFQRMKESPFYAEDKTILQENTLFNDKDFADKTYHKAYPTINHLIKAWIENKVKPDPRLLYLACHNIIKKRGHFLFEGDFDSENQFDTSIQALFEYLREDMEVDIDADSQKVKEILKDSSLKNSEKQSRLNKILGLKPSDKQKKAITNLISGNKINFADLYDNPDLKDAEKNSISFSKDDFDALSDDLASILGDSFELLLKAKAVYNCSVLSKVIGDEQYLSFAKVKIYEKHKTDLTKLKNVIKKHFPKDYKKVFGYNKNEKNNNNYSGYVGVCKTKSKKLIINNSVNQEDFYKFLKTILSAKSEIKEVNDILTEIETGTFLPKQISKSNAEIPYQLRKMELEKILSNAEKHFSFLKQKDEKGLSHSEKIIMLLTFKIPYYIGPINDNHKKFFPDRCWVVKKEKSPSGKTTPWNFFDHIDKEKTAEAFITSRTNFCTYLVGESVLPKSSLLYSEYTVLNEINNLQIIIDGKNICDIKLKQKIYEDLFKKYKKITQKQISTFIKHEGICNKTDEVIILGIDKECTSSLKSYIELKNIFGKQVDEISTKNMLEEIIRWATIYDEGEGKTILKTKIKAEYGKYCSDEQIKKILNLKFSGWGRLSRKFLETVTSEMPGFSEPVNIITAMRETQNNLMELLSSEFTFTENIKKINSGFEDAEKQFSYDGLVKPLFLSPSVKKMLWQTLKLVKEISHITQAPPKKIFIEMAKGAELEPARTKTRLKILQDLYNNCKNDADAFSSEIKDLSGKIENEDNLRLRSDKLYLYYTQLGKCMYCGKPIEIGHVFDTSNYDIDHIYPQSKIKDDSISNRVLVCSSCNKNKEDKYPLKSEIQSKQRGFWNFLQRNNFISLEKLNRLTRATPISDDETAKFIARQLVETRQATKVAAKVLEKMFPETKIVYSKAETVSMFRNKFDIVKCREINDFHHAHDAYLNIVVGNVYNTKFTNNPWNFIKEKRDNPKIADTYNYYKVFDYDVKRNNITAWEKGKTIITVKDMLKRNTPIYTRQAACKKGELFNQTIMKKGLGQHPLKKEGPFSNISKYGGYNKVSAAYYTLIEYEEKGNKIRSLETIPLYLVKDIQKDQDVLKSYLTDLLGKKEFKILVPKIKINSLLKINGFPCHITGKTNDSFLLRPAVQFCCSNNEVLYFKKIIRFSEIRSQREKIGKTISPYEDLSFRSYIKENLWKKTKNDEIGEKEFYDLLQKKNLEIYDMLLTKHKDTIYKKRPNSATIDILVKGKEKFKSLIIENQFEVILEILKLFSATRNVSDLQHIGGSKYSGVAKIGNKISSLDNCILIYQSITGIFEKRIDLLKV

SEQ ID NO: 36 - protein, 1365 aa, Filifactor alocis
MTKEYYLGLDVGTNSVGWAVTDSQYNLCKFKKKDMWGIRLFESANTAKDRRLQRGNRRRLERKKQRIDLLQEIFSPEICKIDPTFFIRLNESRLHLEDKSNDFKYPLFIEKDYSDIEYYKEFPTIFHLRKHLIESEEKQDIRLIYLALHNIIKTRGHFLIDGDLQSAKQLRPILDTFLLSLQEEQNLSVSLSENQKDEYEEILKNRSIAKSEKVKKLKNLFEISDELEKEEKKAQSAVIENFCKFIVGNKGDVCKFLRVSKEELEIDSFSFSEGKYEDDIVKNLEEKVPEKVYLFEQMKAMYDWNILVDILETEEYISFAKVKQYEKHKTNLRLLRDIILKYCTKDEYNRMFNDEKEAGSYTAYVGKLKKNNKKYWIEKKRNPEEFYKSLGKLLDKIEPLKEDLEVLTMMIEECKNHTLLPIQKNKDNGVIPHQVHEVELKKILENAKKYYSFLTETDKDGYSVVQKIESIFRFRIPYYVGPLSTRHQEKGSNVWMVRKPGREDRIYPWNMEEIIDFEKSNENFITRMTNKCTYLIGEDVLPKHSLLYSKYMVLNELNNVKVRGKKLPTSLKQKVFEDLFENKSKVTGKNLLEYLQIQDKDIQIDDLSGFDKDFKTSLKSYLDFKKQIFGEEIEKESIQNMIEDIIKWITIYGNDKEMLKRVIRANYSNQLTEEQMKKITGFQYSGWGNFSKMFLKGISGSDVSTGETFDIITAMWETDNNLMQILSKKFTFMDNVEDFNSGKVGKIDKITYDSTVKEMFLSPENKRAVWQTIQVAEEIKKVMGCEPKKIFIEMARGGEKVKKRTKSRKAQLLELYAACEEDCRELIKEIEDRDERDFNSMKLFLYYTQFGKCMYSGDDIDINELIRGNSKWDRDHIYPQSKIKDDSIDNLVLVNKTYNAKKSNELLSEDIQKKMHSFWLSLLNKKLITKSKYDRLTRKGDFTDEELSGFIARQLVETRQSTKAIADIFKQIYSSEVVYVKSSLVSDFRKKPLNYLKSRRVNDYHHAKDAYLNIVVGNVYNKKFTSNPIQWMKKNRDTNYSLNKVFEHDVVINGEVIWEKCTYHEDTNTYDGGTLDRIRKIVERDNILYTEYAYCEKGELFNATIQNKNGNSTVSLKKGLDVKKYGGYFSANTSYFSLIEFEDKKGDRARHIIGVPIYIANMLEHSPSAFLEYCEQKGYQNVRILVEKIKKNSLLIINGYPLRIRGENEVDTSFKRAIQLKLDQKNYELVRNIEKFLEKYVEKKGNYPIDENRDHITHEKMNQLYEVLLSKMKKFNKKGMADPSDRIEKSKPKFIKLEDLIDKINVINKMLNLLRCDNDTKADLSLIELPKNAGSFVVKKNTIGKSKIILVNQSVTGLYENRREL

SEQ ID NO: 37 - protein, 1334 aa, Staphylococcus pseudintermedius
MGRKPYILSLDIGTGSVGYACMDKGFNVLKYHDKDALGVYLFDGALTAQERRQFRTSRRRKNRRIKRLGLLQELLAPLVQNPNFYQFQRQFAWKNDNMDFKNKSLSEVLSFLGYESKKYPTIYHLQEALLLKDEKFDPELIYMALYHLVKYRGHFLFDHLKIENLTNNDNMHDFVELIETYENLNNIKLNLDYEKTKVIYEILKDNEMTKNDRAKRVKNMEKKLEQFSIMLLGLKFNEGKLFNHADNAEELKGANQSHTFADNYEENLTPFLTVEQSEFIERANKIYLSLTLQDILKGKKSMAMSKVAAYDKFRNELKQVKDIVYKADSTRTQFKKIFVSSKKSLKQYDATPNDQTFSSLCLFDQYLIRPKKQYSLLIKELKKIIPQDSELYFEAENDTLLKVLNTTDNASIPMQINLYEAETILRNQQKYHAEITDEMIEKVLSLIQFRIPYYVGPLVNDHTASKFGWMERKSNESIKPWNFDEVVDRSKSATQFIRRMTNKCSYLINEDVLPKNSLLYQEMEVLNELNATQIRLQTDPKNRKYRMMPQIKLFAVEHIFKKYKTVSHSKFLEIMLNSNHRENFMNHGEKLSIFGTQDDKKFASKLSSYQDMTKIFGDIEGKRAQIEEIIQWITIFEDKKILVQKLKECYPELTSKQINQLKKLNYSGWGRLSEKLLTHAYQGHSIIELLRHSDENFMEILTNDVYGFQNFIKEENQVQSNKIQHQDIANLTTSPALKKGIWSTIKLVRELTSIFGEPEKIIMEFATEDQQKGKKQKSRKQLWDDNIKKNKLKSVDEYKYIIDVANKLNNEQLQQEKLWLYLSQNGKCMYSGQSIDLDALLSPNATKHYEVDHIFPRSFIKDDSIDNKVLVIKKMNQTKGDQVPLQFIQQPYERIAYWKSLNKAGLISDSKLHKLMKPEFTAMDKEGFIQRQLVETRQISVHVRDFLKEEYPNTKVIPMKAKMVSEFRKKFDIPKIRQMNDAHHAIDAYLNGVVYHGAQLAYPNVDLFDFNFKWEKVREKWKALGEFNTKQKSRELFFFKKLEKMEVSQGERLISKIKLDMNHFKINYSRKLANIPQQFYNQTAVSPKTAELKYESNKSNEVVYKGLTPYQTYVVAIKSVNKKGKEKMEYQMIDHYVFDFYKFQNGNEKELALYLAQRENKDEVLDAQIVYSLNKGDLLYINNHPCYFVSRKEVINAKQFELTVEQQLSLYNVMNNKETNVEKLLIEYDFIAEKVINEYHHYLNSKLKEKRVRTFFSESNQTHEDFIKALDELFKVVTASATRSDKIGSRKNSMTHRAFLGKGKDVKIAYTSISGLKTTKPKSLFKLAESRNEL

SEQ ID NO: 38 - protein, 1375 aa, Lactobacillus johnsonii
MTKIKDDYIVGLDIGTDSCGWVAMNSNNDILKLQGKTAIGSRLFEGGKSAAERRLFRTTHRRIKRRRWRLKLLEEFFDPYMAEVDPYFFARLKESGLSPLDKRKTVSSIVFPTSAEDKKFYDDYPTIYHLRYKLMTEDEKFDLREVYLAIHHIIKYRGNFLYNTSVKDFKASKIDVKSSIEKLNELYENLGLDLNVEFNISNTAEIEKVLKDKQIFKRDKVKKIAELFAIKTDNKEQSKRIKDISKQVANAVLGYKTRFDTIALKEISKDELSDWNFKLSDIDADSKFEALMGNLDENEQAILLTIKELFNEVTLNGIVEDGNTLSESMINKYNDHRDDLKLLKEVIENHIDRKKAKELALAYDLYVNNRHGQLLQAKKKLGKIKPRSKEDFYKVVNKNLDDSRASKEIKKKIELDSFMPKQRTNANGVIPYQLQQLELDKIIENQSKYYPFLKEINPVSSHLKEAPYKLDELIRFRVPYYVGPLISPNESTKDIQTKKNQNFAWMIRKEEGRITPWNFDQKVDRIESANKFIKRMTTKDTYLFGEDVLPANSLLYQKFTVLNELNNIRINGKRISVDLKQEIYENLFKKHTTVTVKKLENYLKENHNLVKVEIKGLADEKKFNSGLTTYNRFKNLNIFDNQIDDLKYRNDFEKIIEWSTIFEDKSIYKEKLRSIDWLNEKQINALSNIRLQGWGRLSKKLLAQLHDHNGQTIIEQLWDSQNNFMQIVTQADFKDAIAKANQNLLVATSVEDILNNAYTSPANKKAIRQVIKVVDDIVKAASGKVPKQIAIEFTRDADENPKRSQTRGSKLQKVYKDLSTELASKTIAEELNEAIKDKKLVQDKYYLYFMQLGRDAYTGEPINIDEIQKYDIDHILPQSFIKDDALDNRVLVSRAVNNGKSDNVPVKLFGNEMAANLGMTIRKMWEEWKNIGLISKTKYNNLLTDPDHINKYKSAGFIRRQLVETSQIIKLVSTILQSRYPNTEIITVKAKYNHYLREKFDLYKSREVNDYHHAIDAYLSAICGNLLYQNYPNLRPFFVYGQYKKFSSDPDKEKAIFNKTRKFSFISQLLKNKSENSKEIAKKLKRAYQFKYMLVSRETETRDQEMFKMTVYPRFSHDTVKAPRNLIPKKMGMSPDIYGGYTNNSDAYMVIVRIDKKKGTEYKILGIPTRELVNLKKAEKEDHYKSYLKEILTPRILYNKNGKRDKKITSFEIVKSKIPYKQVIQDGDKKFMLGSSTYVYNAKQLTLSTESMKAITNNFDKDSDENDALIKAYDEILDKVDKYLPLFDINKFREKLHSGREKFIKLSLEDKKDTILKVLEGLHDNAVMTKIPTIGLSTPLGFMQFPNGVILSENAKLIYQSPTGLFKKSVKISDL

SEQ ID NO: 39 - protein, 1269 aa, Mycoplasma gallisepticum
  source 1..1269: note = Mycoplasma gallisepticum str. F
MNNSIKSKPEVTIGLDLGVGSVGWAIVDNETNIIHHLGSRLFSQAKTAEDRRSFRGVRRLIRRRKYKLKRFVNLIWKYNSYFGFKNKEDILNNYQEQQKLHNTVLNLKSEALNAKIDPKALSWILHDYLKNRGHFYEDNRDFNVYPTKELAKYFDKYGYYKGIIDSKEDNDNKLEEELTKYKFSNKHWLEEVKKVLSNQTGLPEKFKEEYESLFSYVRNYSEGPGSINSVSPYGIYHLDEKEGKVVQKYNNIWDKTIGKCNIFPDEYRAPKNSPIAMIFNEINELSTIRSYSIYLTGWFINQEFKKAYLNKLLDLLIKTNGEKPIDARQFKKLREETIAESIGKETLKDVENEEKLEKEDHKWKLKGLKLNTNGKIQYNDLSSLAKFVHKLKQHLKLDFLLEDQYATLDKINFLQSLFVYLGKHLRYSNRVDSANLKEFSDSNKLFERILQKQKDGLFKLFEQTDKDDEKILAQTHSLSTKAMLLAITRMTNLDNDEDNQKNNDKGWNFEAIKNFDQKFIDITKKNNNLSLKQNKRYLDDRFINDAILSPGVKRILREATKVFNAILKQFSEEYDVTKVVIELARELSEEKELENTKNYKKLIKKNGDKISEGLKALGISEDEIKDILKSPTKSYKFLLWLQQDHIDPYSLKEIAFDDIFTKTEKFEIDHIIPYSISFDDSSSNKLLVLAESNQAKSNQTPYEFISSGNAGIKWEDYEAYCRKFKDGDSSLLDSTQRSKKFAKMMKTDTSSKYDIGFLARNLNDTRYATIVFRDALEDYANNHLVEDKPMFKVVCINGSVTSFLRKNFDDSSYAKKDRDKNIHHAVDASIISIFSNETKTLFNQLTQFADYKLFKNTDGSWKKIDPKTGVVTEVTDENWKQIRVRNQVSEIAKVIEKYIQDSNIERKARYSRKIENKTNISLFNDTVYSAKKVGYEDQIKRKNLKTLDIHESAKENKNSKVKRQFVYRKLVNVSLLNNDKLADLFAEKEDILMYRANPWVINLAEQIFNEYTENKKIKSQNVFEKYMLDLTKEFPEKFSEFLVKSMLRNKTAIIYDDKKNIVHRIKRLKMLSSELKENKLSNVIIRSKNQSGTKLSYQDTINSLALMIMRSIDPTAKKQYIRVPLNTLNLHLGDHDFDLHNMDAYLKKPKFVKYLKANEIGDEYKPWRVLTSGTLLIHKKDKKLMYISSFQNLNDVIEIKNLIETEYKENDDSDSKKKKKANRFLMTLSTILNDYILLDAKDNFDILGLSKNRIDEILNSKLGLDKIVK

SEQ ID NO: 40 - protein, 1003 aa, unidentified; identical to SEQ ID NO: 30

SEQ ID NO: 41 - protein, 1120 aa, unidentified
MSDLVLGLDIGIGSVGVGILNKVTGEIIHKNSRIFPAAQAENNLVRRTNRQGRRLARRKKHRRVRLNRLFEESGLITDFTKISINLNPYQLRVKGLTDELSNEELFIALKNMVKHRGISYLDDASDDGNSSVGDYAQIVKENSKQLETKTPGQIQLERYQTYGQLRGDFTVEKDGKKHRLINVFPTSAYRSEALRILQTQQEFNPQITDEFINRYLEILTGKRKYYHGPGNEKSRTDYGRYRTSGETLDNIFGILIGKCTFYPDEFRAAKASYTAQEFNLLNDLNNLTVPTETKKLSKEQKNQIINYVKNEKAMGPAKLFKYIAKLLSCDVADIKGYRIDKSGKAEIHTFEAYRKMKTLETLDIEQMDRETLDKLAYVLTLNTEREGIQEALEHEFADGSFSQKQVDELVQFRKANSSIFGKGWHNFSVKLMMELIPELYETSEEQMTILTRLGKQKTTSSSNKTKYIDEKLLTEEIYNPVVAKSVRQAIKIVNAAIKEYGDFDNIVIEMARETNEDDEKKAIQKIQKANKDEKDAAMLKAANQYNGKAELPHSVFHGHKQLATKIRLWHQQGERCLYTGKTISIHDLINNSNQFEVDHILPLSITFDDSLANKVLVYATANQEKGQRTPYQALDSMDDAWSFRELKAFVRESKTLSNKKKEYLLTEEDISKFDVRKKFIERNLVDTRYASRVVLNALQEHFRAHKIDTKVSVVRGQFTSQLRRHWGIEKTRDTYHHHAVDALIIAASSQLNLWKKQKNTLVSYSEDQLLDIETGELISDDEYKESVFKAPYQHFVDTLKSKEFEDSILFSYQVDSKFNRKISDATIYATRQAKVGKDKADETYVLGKIKDIYTQDGYDAFMKIYKKDKSKFLMYRHDPQTFEKVIEPILENYPNKQINEKGKEVPCNPFLKYKEEHGYIRKYSKKGNGPEIKSLKYYDSKLGNHIDITPKDSNNKVVLQSVSPWRADVYFNKTTGKYEILGLKYADLQFEKGTGTYKISQEKYNDIKKKEGVDSDSEFKFTLYKNDLLLVKDTETKEQQLFRFLSRTMPKQKHYVELKPYDKQKFEGGEALIKVLGNVANSGQCKKGLGKSNISIYKVRTDVLGNQHIIKNEGDKPKLM

SEQ ID NO: 42 - protein, 1415 aa, Bergeyella zoohelcum
MKHILGLDLGTNSIGWALIERNIEEKYGKIIGMGSRIVPMGAELSKFEQGQAQTKNADRRTNRGARRLNKRYKQRRNKLIYILQKLDMLPSQIKLKEDFSDPNKIDKITILPISKKQEQLTAFDLVSLRVKALTEKVGLEDLGKIIYKYNQLRGYAGGSLEPEKEDIFDEEQSKDKKNKSFIAFSKIVFLGEPQEEIFKNKKLNRRAIIVETEEGNFEGSTFLENIKVGDSLELLINISASKSGDTITIKLPNKTNWRKKMENIENQLKEKSKEMGREFYISEFLLELLKENRWAKIRNNTILRARYESEFEAIWNEQVKHYPFLENLDKKTLIEIVSFIFPGEKESQKKYRELGLEKGLKYIIKNQVVFYQRELKDQSHLISDCRYEPNEKAIAKSHPVFQEYKVWEQINKLIVNTKIEAGTNRKGEKKYKYIDRPIPTALKEWIFEELQNKKEITFSAIFKKLKAEFDLREGIDFLNGMSPKDKLKGNETKLQLQKSLGELWDVLGLDSINRQIELWNILYNEKGNEYDLTSDRTSKVLEFINKYGNNIVDDNAEETAIRISKIKFARAYSSLSLKAVERILPLVRAGKYFNNDFSQQLQSKILKLLNENVEDPFAKAAQTYLDNNQSVLSEGGVGNSIATILVYDKHTAKEYSHDELYKSYKEINLLKQGDLRNPLVEQIINEALVLIRDIWKNYGIKPNEIRVELARDLKNSAKERATIHKRNKDNQTINNKIKETLVKNKKELSLANIEKVKLWEAQRHLSPYTGQPIPLSDLFDKEKYDVDHIIPISRYFDDSFTNKVISEKSVNQEKANRTAMEYFEVGSLKYSIFTKEQFIAHVNEYFSGVKRKNLLATSIPEDPVQRQIKDTQYIAIRVKEELNKIVGNENVKTTTGSITDYLRNHWGLTDKFKLLLKERYEALLESEKFLEAEYDNYKKDFDSRKKEYEEKEVLFEEQELTREEFIKEYKENYIRYKKNKLIIKGWSKRIDHRHHAIDALIVACTEPAHIKRLNDLNKVLQDWLVEHKSEFMPNFEGSNSELLEEILSLPENERTEIFTQIEKFRAIEMPWKGFPEQVEQKLKEIIISHKPKDKLLLQYNKAGDRQIKLRGQLHEGTLYGISQGKEAYRIPLTKFGGSKFATEKNIQKIVSPFLSGFIANHLKEYNNKKEEAFSAEGIMDLNNKLAQYRNEKGELKPHTPISTVKIYYKDPSKNKKKKDEEDLSLQKLDREKAFNEKLYVKTGDNYLFAVLEGEIKTKKTSQIKRLYDIISFFDATNFLKEEFRNAPDKKTFDKDLLFRQYFEERNKAKLLFTLKQGDFVYLPNENEEVILDKESPLYNQYWGDLKERGKNIYVVQKFSKKQIYFIKHTIADIIKKDVEFGSQNCYETVEGRSIKENCFKLEIDRLGNIVKVIKR

SEQ ID NO: 43 - protein, 1338 aa, Coprococcus catus
MKQEYFLGLDMGTGSLGWAVTDSTYQVMRKHGKALWGTRLFESASTAEERRMFRTARRRLDRRNWRIQVLQEIFSEEISKVDPGFFLRMKESKYYPEDKRDAEGNCPELPYALFVDDNYTDKNYHKDYPTIYHLRKMLMETTEIPDIRLVYLVLHHMMKHRGHFLLSGDISQIKEFKSTFEQLIQNIQDEELEWHISLDDAAIQFVEHVLKDRNLTRSTKKSRLIKQLNAKSACEKAILNLLSGGTVKLSDIFNNKELDESERPKVSFADSGYDDYIGIVEAELAEQYYIIASAKAVYDWSVLVEILGNSVSISEAKIKVYQKHQADLKTLKKIVRQYMTKEDYKRVFVDTEEKLNNYSAYIGMTKKNGKKVDLKSKQCTQADFYDFLKKNVIKVIDHKEITQEIESEIEKENFLPKQVTKDNGVIPYQVHDYELKKILDNLGTRMPFIKENAEKIQQLFEFRIPYYVGPLNRVDDGKDGKFTWSVRKSDARIYPWNFTEVIDVEASAEKFIRRMTNKCTYLVGEDVLPKDSLVYSKFMVLNELNNLRLNGEKISVELKQRIYEELFCKYRKVTRKKLERYLVIEGIAKKGVEITGIDGDFKASLTAYHDFKERLTDVQLSQRAKEAIVLNVVLFGDDKKLLKQRLSKMYPNLTTGQLKGICSLSYQGWGRLSKTFLEEITVPAPGTGEVWNIMTALWQTNDNLMQLLSRNYGFTNEVEEFNTLKKETDLSYKTVDELYVSPAVKRQIWQTLKVVKEIQKVMGNAPKRVFVEMAREKQEGKRSDSRKKQLVELYRACKNEERDWITELNAQSDQQLRSDKLFLYYIQKGRCMYSGETIQLDELWDNTKYDIDHIYPQSKTMDDSLNNRVLVKKNYNAIKSDTYPLSLDIQKKMMSFWKMLQQQGFITKEKYVRLVRSDELSADELAGFIERQIVETRQSTKAVATILKEALPDTEIVYVKAGNVSNFRQTYELLKVREMNDLHHAKDAYLNIVVGNAYFVKFTKNAAWFIRNNPGRSYNLKRMFEFDIERSGEIAWKAGNKGSIVTVKKVMQKNNILVTRKAYEVKGGLFDQQIMKKGKGQVPIKGNDERLADIEKYGGYNKAAGTYFMLVKSLDKKGKEIRTIEFVPLYLKNQIEINHESAIQYLAQERGLNSPEILLSKIKIDTLFKVDGFKMWLSGRTGNQLIFKGANQLILSHQEAAILKGVVKYVNRKNENKDAKLSERDGMTEEKLLQLYDTFLDKLSNTVYSIRLSAQIKTLTEKRAKFIGLSNEDQCIVLNEILHMFQCQSGSANLKLIGGPGSAGILVMNNNITACKQISVINQSPTGIYEKEIDLIKL

SEQ ID NO: 44 - protein, 1082 aa, Neisseria meningitidis
MAAFKPNPINYILGLDIGIASVGWAMVEIDEDENPICLIDLGVRVFERAEVPKTGDSLAMARRLARSVRRLTRRRAHRLLRARRLLKREGVLQAADFDENGLIKSLPNTPWQLRAAALDRKLTPLEWSAVLLHLIKHRGYLSQRKNEGETADKELGALLKGVADNAHALQTGDFRTPAELALNKFEKESGHIRNQRGDYSHTFSRKDLQAELILLFEKQKEFGNPHVSGGLKEGIETLLMTQRPALSGDAVQKMLGHCTFEPAEPKAAKNTYTAERFIWLTKLNNLRILEQGSERPLTDTERATLMDEPYRKSKLTYAQARKLLGLEDTAFFKGLRYGKDNAEASTLMEMKAYHAISRALEKEGLKDKKSPLNLSPELQDEIGTAFSLFKTDEDITGRLKDRIQPEILEALLKHISFDKFVQISLKALRRIVPLMEQGKRYDEACAEIYGDHYGKKNTEEKIYLPPIPADEIRNPVVLRALSQARKVINGVVRRYGSPARIHIETAREVGKSFKDRKEIEKRQEENRKDREKAAAKFREYFPNFVGEPKSKDILKLRLYEQQHGKCLYSGKEINLGRLNEKGYVEIDHALPFSRTWDDSFNNKVLVLGSENQNKGNQTPYEYFNGKDNSREWQEFKARVETSRFPRSKKQRILLQKFDEDGFKERNLNDTRYVNRFLCQFVADRMRLTGKGKKRVFASNGQITNLLRGFWGLRKVRAENDRHHALDAVVVACSTVAMQQKITRFVRYKEMNAFDGKTIDKETGEVLHQKTHFPQPWEFFAQEVMIRVFGKPDGKPEFEEADTPEKLRTLLAEKLSSRPEAVHEYVTPLFVSRAPNRKMSGQGHMETVKSAKRLDEGVSVLRVPLTQLKLKDLEKMVNREREPKLYEALKARLEAHKDDPAKAFAEPFYKYDKAGNRTQQVKAVRVEQVQKTGVWVRNHNGIADNATMVRVDVFEKGDKYYLVPIYSWQVAKGILPDRAVVQGKDEEDWQLIDDSFNFKFSLHPNDLVEVITKKARMFGYFASCHRGTGNINIRIHDLDHKIGKNGILEGIGVKTALSFQKYQIDELGKEIRPCRLKKRPPVR

SEQ ID NO: 45 - protein, 1195 aa, Elusimicrobium minutum
MQKNINTKQNHIYIKQAQKIKEKLGDKPYRIGLDLGVGSIGFAIVSMEENDGNVLLPKEIIMVGSRIFKASAGAADRKLSRGQRNNHRHTRERMRYLWKVLAEQKLALPVPADLDRKENSSEGETSAKRFLGDVLQKDIYELRVKSLDERLSLQELGYVLYHIAGHRGSSAIRTFENDSEEAQKENTENKKIAGNIKRLMAKKNYRTYGEYLYKEFFENKEKHKREKISNAANNHKFSPTRDLVIKEAEAILKKQAGKDGFHKELTEEYIEKLTKAIGYESEKLIPESGFCPYLKDEKRLPASHKLNEERRLWETLNNARYSDPIVDIVTGEITGYYEKQFTKEQKQKLFDYLLTGSELTPAQTKKLLGLKNTNFEDIILQGRDKKAQKIKGYKLIKLESMPFWARLSEAQQDSFLYDWNSCPDEKLLTEKLSNEYHLTEEEIDNAFNEIVLSSSYAPLGKSAMLIILEKIKNDLSYTEAVEEALKEGKLTKEKQAIKDRLPYYGAVLQESTQKIIAKGFSPQFKDKGYKTPHTNKYELEYGRIANPVVHQTLNELRKLVNEIIDILGKKPCEIGLETARELKKSAEDRSKLSREQNDNESNRNRIYEIYIRPQQQVIITRRENPRNYILKFELLEEQKSQCPFCGGQISPNDIINNQADIEHLFPIAESEDNGRNNLVISHSACNADKAKRSPWAAFASAAKDSKYDYNRILSNVKENIPHKAWRFNQGAFEKFIENKPMAARFKTDNSYISKVAHKYLACLFEKPNIICVKGSLTAQLRMAWGLQGLMIPFAKQLITEKESESFNKDVNSNKKIRLDNRHHALDAIVIAYASRGYGNLLNKMAGKDYKINYSERNWLSKILLPPNNIVWENIDADLESFESSVKTALKNAFISVKHDHSDNGELVKGTMYKIFYSERGYTLTTYKKLSALKLTDPQKKKTPKDFLETALLKFKGRESEMKNEKIKSAIENNKRLFDVIQDNLEKAKKLLEEENEKSKAEGKKEKNINDASIYQKAISLSGDKYVQLSKKEPGKFFAISKPTPTTTGYGYDTGDSLCVDLYYDNKGKLCGEIIRKIDAQQKNPLKYKEQGFTLFERIYGGDILEVDFDIHSDKNSFRNNTGSAPENRVFIKVGTFTEITNNNIQIWFGNIIKSTGGQDDSFTINSMQQYNPRKLILSSCGFIKYRSPILKNKEG

SEQ ID NO: 46 - protein, 1062 aa, Treponema sp.
MIMKLEKWRLGLDLGTNSIGWSVFSLDKDNSVQDLIDMGVRIFSDGRDPKTKEPLAVARRTARSQRKLIYRRKLRRKQVFKFLQEQGLFPKTKEECMTLKSLNPYELRIKALDEKLEPYELGRALFNLAVRRGFKSNRKDGSREEVSEKKSPDEIKTQADMQTHLEKAIKENGCRTITEFLYKNQGENGGIRFAPGRMTYYPTRKMYEEEFNLIRSKQEKYYPQVDWDDIYKAIFYQRPLKPQQRGYCIYENDKERTFKAMPCSQKLRILQDIGNLAYYEGGSKKRVELNDNQDKVLYELLNSKDKVTFDQMRKALCLADSNSFNLEENRDFLIGNPTAVKMRSKNRFGKLWDEIPLEEQDLIIETIITADEDDAVYEVIKKYDLTQEQRDFIVKNTILQSGTSMLCKEVSEKLVKRLEEIADLKYHEAVESLGYKFADQTVEKYDLLPYYGKVLPGSTMEIDLSAPETNPEKHYGKISNPTVHVALNQTRVVVNALIKEYGKPSQIAIELSRDLKNNVEKKAEIARKQNQRAKENIAINDTISALYHTAFPGKSFYPNRNDRMKYRLWSELGLGNKCIYCGKGISGAELFTKEIEIEHILPFSRTLLDAESNLTVAHSSCNAFKAERSPFEAFGTNPSGYSWQEIIQRANQLKNTSKKNKFSPNAMDSFEKDSSFIARQLSDNQYIAKAALRYLKCLVENPSDVWTTNGSMTKLLRDKWEMDSILCRKFTEKEVALLGLKPEQIGNYKKNRFDHRHHAIDAVVIGLTDRSMVQKLATKNSHKGNRIEIPEFPILRSDLIEKVKNIVVSFKPDHGAEGKLSKETLLGKIKLHGKETFVCRENIVSLSEKNLDDIVDEKIKSKVKDYVAKHKGQKIEAVLSDFSKENGIKKVRCVNRVQTPIEITSGKISRYLSPEDYFAAVIWEIPGEKKTFKAQYIRRNEVEKNSKGLNVVKPAVLENGKPHPAAKQVCLLHKDDYLEFSDKGKMYFCRIAGYAATNNKLDIRPVYAVSYCADWINSTNETMLTGYWKPTPTQNWVSVNVLFDKQKARLVTVSPIGRVFRK

SEQ ID NO: 47 - protein, 1054 aa, Staphylococcus lugdunensis
MNQKFILGLDIGITSVGYGLIDYETKNIIDAGVRLFPEANVENNEGRRSKRGSRRLKRRRIHRLERVKKLLEDYNLLDQSQIPQSTNPYAIRVKGLSEALSKDELVIALLHIAKRRGIHKIDVIDSNDDVGNELSTKEQLNKNSKLLKDKFVCQIQLERMNEGQVRGEKNRFKTADIIKEIIQLLNVQKNFHQLDENFINKYIELVEMRREYFEGPGKGSPYGWEGDPKAWYETLMGHCTYFPDELRSVKYAYSADLFNALNDLNNLVIQRDGLSKLEYHEKYHIIENVFKQKKKPTLKQIANEINVNPEDIKGYRITKSGKPQFTEFKLYHDLKSVLFDQSILENEDVLDQIAEILTIYQDKDSIKSKLTELDILLNEEDKENIAQLTGYTGTHRLSLKCIRLVLEEQWYSSRNQMEIFTHLNIKPKKINLTAANKIPKAMIDEFILSPVVKRTFGQAINLINKIIEKYGVPEDIIIELARENNSKDKQKFINEMQKKNENTRKRINEIIGKYGNQNAKRLVEKIRLHDEQEGKCLYSLESIPLEDLLNNPNHYEVDHIIPRSVSFDNSYHNKVLVKQSENSKKSNLTPYQYFNSGKSKLSYNQFKQHILNLSKSQDRISKKKKEYLLEERDINKFEVQKEFINRNLVDTRYATRELTNYLKAYFSANNMNVKVKTINGSFTDYLRKVWKFKKERNHGYKHHAEDALIIANADFLFKENKKLKAVNSVLEKPEIESKQLDIQVDSEDNYSEMFIIPKQVQDIKDFRNFKYSHRVDKKPNRQLINDTLYSTRKKDNSTYIVQTIKDIYAKDNTTLKKQFDKSPEKFLMYQHDPRTFEKLEVIMKQYANEKNPLAKYHEETGEYLTKYSKKNNGPIVKSLKYIGNKLGSHLDVTHQFKSSTKKLVKLSIKPYRFDVYLTDKGYKFITISYLDVLKKDNYYYIPEQKYDKLKLGKAIDKNAKFIASFYKNDLIKLDGEIYKIIGVNSDTRNMIELDLPDIRYKEYCELNNIKGEPRIKKTIGKKVNSIEKLTTDVLGNVFTNTQYTKPQLLFKRGN

SEQ ID NO: 48 - protein, 1388 aa, Streptococcus thermophilus
MTKPYSIGLDIGTNSVGWAVTTDNYKVPSKKMKVLGNTSKKYIKKNLLGVLLFDSGITAEGRRLKRTARRRYTRRRNRILYLQEIFSTEMATLDDAFFQRLDDSFLVPDDKRDSKYPIFGNLVEEKAYHDEFPTIYHLRKYLADSTKKADLRLVYLALAHMIKYRGHFLIEGEFNSKNNDIQKNFQDFLDTYNAIFESDLSLENSKQLEEIVKDKISKLEKKDRILKLFPGEKNSGIFSEFLKLIVGNQADFRKCFNLDEKASLHFSKESYDEDLETLLGYIGDDYSDVFLKAKKLYDAILLSGFLTVTDNETEAPLSSAMIKRYNEHKEDLALLKEYIRNISLKTYNEVFKDDTKNGYAGYIDGKTNQEDFYVYLKKLLAEFEGADYFLEKIDREDFLRKQRTFDNGSIPYQIHLQEMRAILDKQAKFYPFLAKNKERIEKILTFRIPYYVGPLARGNSDFAWSIRKRNEKITPWNFEDVIDKESSAEAFINRMTSFDLYLPEEKVLPKHSLLYETFNVYNELTKVRFIAESMRDYQFLDSKQKKDIVRLYFKDKRKVTDKDIIEYLHAIYGYDGIELKGIEKQFNSSLSTYHDLLNIINDKEFLDDSSNEAIIEEIIHTLTIFEDREMIKQRLSKFENIFDKSVLKKLSRRHYTGWGKLSAKLINGIRDEKSGNTILDYLIDDGISNRNFMQLIHDDALSFKKKIQKAQIIGDEDKGNIKEVVKSLPGSPAIKKGILQSIKIVDELVKVMGGRKPESIVVEMARENQYTNQGKSNSQQRLKRLEKSLKELGSKILKENIPAKLSKIDNNALQNDRLYLYYLQNGKDMYTGDDLDIDRLSNYDIDHIIPQAFLKDNSIDNKVLVSSASNRGKSDDVPSLEVVKKRKTFWYQLLKSKLISQRKFDNLTKAERGGLSPEDKAGFIQRQLVETRQITKHVARLLDEKFNNKKDENNRAVRTVKIITLKSTLVSQFRKDFELYKVREINDFHHAHDAYLNAVVASALLKKYPKLEPEFVYGDYPKYNSFRERKSATEKVYFYSNIMNIFKKSISLADGRVIERPLIEVNEETGESVWNKESDLATVRRVLSYPQVNVVKKVEEQNHGLDRGKPKGLFNANLSSKPKPNSNENLVGAKEYLDPKKYGGYAGISNSFTVLVKGTIEKGAKKKITNVLEFQGISILDRINYRKDKLNFLLEKGYKDIELIIELPKYSLFELSDGSRRMLASILSTNNKRGEIHKGNQIFLSQKFVKLLYHAKRISNTINENHRKYVENHKKEFEELFYYILEFNENYVGAKKNGKLLNSAFQSWQNHSIDELCSSFIGPTGSERKGLFELTSRGSAADFEFLGVKIPRYRDYTPSSLLKDATLIHQSVTGLYETRIDLAKLGEG

SEQ ID NO: 49 - protein, 1436 aa, Bacteroides fragilis
MKRILGLDLGTNSIGWALVNEAENKDERSSIVKLGVRVNPLTVDELTNFEKGKSITTNADRTLKRGMRRNLQRYKLRRETLTEVLKEHKLITEDTILSENGNRTTFETYRLRAKAVTEEISLEEFARVLLMINKKRGYKSSRKAKGVEEGTLIDGMDIARELYNNNLTPGELCLQLLDAGKKFLPDFYRSDLQNELDRIWEKQKEYYPEILTDVLKEELRGKKRDAVWAICAKYFVWKENYTEWNKEKGKTEQQEREHKLEGIYSKRKRDEAKRENLQWRVNGLKEKLSLEQLVIVFQEMNTQINNSSGYLGAISDRSKELYFNKQTVGQYQMEMLDKNPNASLRNMVFYRQDYLDEFNMLWEKQAVYHKELTEELKKEIRDIIIFYQRRLKSQKGLIGFCEFESRQIEVDIDGKKKIKTVGNRVISRSSPLFQEFKIWQILNNIEVTVVGKKRKRRKLKENYSALFEELNDAEQLELNGSRRLCQEEKELLAQELFIRDKMTKSEVLKLLFDNPQELDLNFKTIDGNKTGYALFQAYSKMIEMSGHEPVDFKKPVEKVVEYIKAVFDLLNWNTDILGFNSNEELDNQPYYKLWHLLYSFEGDNTPTGNGRLIQKMTELYGFEKEYATILANVSFQDDYGSLSAKAIHKILPHLKEGNRYDVACVYAGYRHSESSLTREEIANKVLKDRLMLLPKNSLHNPVVEKILNQMVNVINVIIDIYGKPDEIRVELARELKKNAKEREELTKSIAQTTKAHEEYKTLLQTEFGLTNVSRTDILRYKLYKELESCGYKTLYSNTYISREKLFSKEFDIEHIIPQARLFDDSFSNKTLEARSVNIEKGNKTAYDFVKEKFGESGADNSLEHYLNNIEDLFKSGKISKTKYNKLKMAEQDIPDGFIERDLRNTQYIAKKALSMLNEISHRVVATSGSVTDKLREDWQLIDVMKELNWEKYKALGLVEYFEDRDGRQIGRIKDWTKRNDHRHHAMDALTVAFTKDVFIQYFNNKNASLDPNANEHAIKNKYFQNGRAIAPMPLREFRAEAKKHLENTLISIKAKNKVITGNINKTRKKGGVNKNMQQTPRGQLHLETIYGSGKQYLTKEEKVNASFDMRKIGTVSKSAYRDALLKRLYENDNDPKKAFAGKNSLDKQPIWLDKEQMRKVPEKVKIVTLEAIYTIRKEISPDLKVDKVIDVGVRKILIDRLNEYGNDAKKAFSNLDKNPIWLNKEKGISIKRVTISGISNAQSLHVKKDKDGKPILDENGRNIPVDFVNTGNNHHVAVYYRPVIDKRGQLVVDEAGNPKYELEEVVVSFFEAVTRANLGLPIIDKDYKTTEGWQFLFSMKQNEYFVFPNEKTGFNPKEIDLLDVENYGLISPNLFRVQKFSLKNYVFRHHLETTIKDTSSILRGITWIDFRSSKGLDTIVKVRVNHIGQIVSVGEY

SEQ ID NO: 50 - protein, 1398 aa, Veillonella atypica
METQTSNQLITSHLKDYPKQDYFVGLDIGTNSVGWAVTNTSYELLKFHSHKMWGSRLFEEGESAVTRRGFRSMRRRLERRKLRLKLLEELFADAMAQVDSTFFIRLHESKYHYEDKTTGHSSKHILFIDEDYTDQDYFTEYPTIYHLRKDLMENGTDDIRKLFLAVHHILKYRGNFLYEGATFNSNAFTFEDVLKQALVNITFNCFDTNSAISSISNILMESGKTKSDKAKAIERLVDTYTVFDEVNTPDKPQKEQVKEDKKTLKAFANLVLGLSANLIDLFGSVEDIDDDLKKLQIVGDTYDEKRDELAKVWGDEIHIIDDCKSVYDAIILMSIKEPGLTISQSKVKAFDKHKEDLVILKSLLKLDRNVYNEMFKSDKKGLHNYVHYIKQGRTEETSCSREDFYKYTKKIVEGLADSKDKEYILNEIELQTLLPLQRIKDNGVIPYQLHLEELKVILDKCGPKFPFLHTVSDGFSVTEKLIKMLEFRIPYYVGPLNTHHNIDNGGFSWAVRKQAGRVTPWNFEEKIDREKSAAAFIKNLTNKCTYLFGEDVLPKSSLLYSEFMLLNELNNVRIDGKALAQGVKQHLIDSIFKQDHKKMTKNRIELFLKDNNYITKKHKPEITGLDGEIKNDLTSYRDMVRILGNNFDVSMAEDIITDITIFGESKKMLRQTLRNKFGSQLNDETIKKLSKLRYRDWGRLSKKLLKGIDGCDKAGNGAPKTIIELMRNDSYNLMEILGDKFSFMECIEEENAKLAQGQVVNPHDIIDELALSPAVKRAVWQALRIVDEVAHIKKALPSRIFVEVARTNKSEKKKKDSRQKRLSDLYSAIKKDDVLQSGLQDKEFGALKSGLANYDDAALRSKKLYLYYTQMGRCAYTGNIIDLNQLNTDNYDIDHIYPRSLTKDDSFDNLVLCERTANAKKSDIYPIDNRIQTKQKPFWAFLKHQGLISERKYERLTRIAPLTADDLSGFIARQLVETNQSVKATTTLLRRLYPDIDVVFVKAENVSDFRHNNNFIKVRSLNHHHHAKDAYLNIVVGNVYHEKFTRNFRLFFKKNGANRTYNLAKMFNYDVICTNAQDGKAWDVKTSMNTVKKMMASNDVRVTRRLLEQSGALADATIYKASVAAKAKDGAYIGMKTKYSVFADVTKYGGMTKIKNAYSIIVQYTGKKGEEIKEIVPLPIYLINRNATDIELIDYVKSVIPKAKDISIKYRKLCINQLVKVNGFYYYLGGKTNDKIYIDNAIELVVPHDIATYIKLLDKYDLLRKENKTLKASSITTSIYNINTSTVVSLSNKVGIDVFDYFMSKLRTPLYMKMKGNKVDELSSTGRSKFIKMTLEEQSIYLLEVLNLLTNSKTTFDVKPLGITGSRSTIGVKIHNLDEFKIINESITGLYSNEVTIV

SEQ ID NO: 51 - protein, 1092 aa, Ilyobacter polytropus
MKYSIGLDIGIASVGWSVINKDKERIEDMGVRIFQKAENPKDGSSLASSRREKRGSRRRNRRKKHRLDRIKNILCESGLVKKNEIEKIYKNAYLKSPWELRAKSLEAKISNKEIAQILLHIAKRRGFKSFRKTDRNADDTGKLLSGIQENKKIMEEKGYLTIGDMVAKDPKFNTHVRNKAGSYLFSFSRKLLEDEVRKIQAKQKELGNTHFTDDVLEKYIEVFNSQRNFDEGPSKPSPYYSEIGQIAKMIGNCTFESSEKRTAKNTWSGERFVFLQKLNNFRIVGLSGKRPLTEEERDIVEKEVYLKKEVRYEKLRKILYLKEEERFGDLNYSKDEKQDKKTEKTKFISLIGNYTIKKLNLSEKLKSEIEEDKSKLDKIIEILTFNKSDKTIESNLKKLELSREDIEILLSEEFSGTLNLSLKAIKKILPYLEKGLSYNEACEKADYDYKNNGIKFKRGELLPVVDKDLIANPVVLRAISQTRKVVNAIIRKYGTPHTIHVEVARDLAKSYDDRQTIIKENKKRELENEKTKKFISEEFGIKNVKGKLLLKYRLYQEQEGRCAYSRKELSLSEVILDESMTDIDHIIPYSRSMDDSYSNKVLVLSGENRKKSNLLPKEYFDRQGRDWDTFVLNVKAMKIHPRKKSNLLKEKFTREDNKDWKSRALNDTRYISRFVANYLENALEYRDDSPKKRVFMIPGQLTAQLRARWRLNKVRENGDLHHALDAAVVAVTDQKAINNISNISRYKELKNCKDVIPSIEYHADEETGEVYFEEVKDTRFPMPWSGFDLELQKRLESENPREEFYNLLSDKRYLGWFNYEEGFIEKLRPVFVSRMPNRGVKGQAHQETIRSSKKISNQIAVSKKPLNSIKLKDLEKMQGRDTDRKLYEALKNRLEEYDDKPEKAFAEPFYKPTNSGKRGPLVRGIKVEEKQNVGVYVNGGQASNGSMVRIDVFRKNGKFYTVPIYVHQTLLKELPNRAINGKPYKDWDLIDGSFEFLYSFYPNDLIEIEFGKSKSIKNDNKLTKTEIPEVNLSEVLGYYRGMDTSTGAATIDTQDGKIQMRIGIKTVKNIKKYQVDVLGNVYKVKREKRQTF

SEQ ID NO: 52 - protein, 1517 aa, Parabacteroides sp.
MKKIVGLDLGTNSIGWALINAYINKEHLYGIEACGSRIIPMDAAILGNFDKGNSISQTADRTSYRGIRRLRERHLLRRERLHRILDLLGFLPKHYSDSLNRYGKFLNDIECKLPWVKDETGSYKFIFQESFKEMLANFTEHHPILIANNKKVPYDWTIYYLRKKALTQKISKEELAWILLNFNQKRGYYQLRGEEEETPNKLVEYYSLKVEKVEDSGERKGKDTWYNVHLENGMIYRRTSNIPLDWEGKTKEFIVTTDLEADGSPKKDKEGNIKRSFRAPKDDDWTLIKKKTEADIDKIKMTVGAYIYDTLLQKPDQKIRGKLVRTIERKYYKNELYQILKTQSEFHEELRDKQLYIACLNELYPNNEPRRNSISTRDFCHLFIEDIIFYQRPLKSKKSLIDNCPYEENRYIDKESGEIKHASIKCIAKSHPLYQEFRLWQFIVNLRIYRKETDVDVTQELLPTEADYVTLFEWLNEKKEIDQKAFFKYPPFGFKKTTSNYRWNYVEDKPYPCNETHAQIIARLGKAHIPKAFLSKEKEETLWHILYSIEDKQEIEKALHSFANKNNLSEEFIEQFKNFPPFKKEYGSYSAKAIKKLLPLMRMGKYWSIENIDNGTRIRINKIIDGEYDENIRERVRQKAINLTDITHFRALPLWLACYLVYDRHSEVKDIVKWKTPKDIDLYLKSFKQHSLRNPIVEQVITETLRTVRDIWQQVGHIDEIHIELGREMKNPADKRARMSQQMIKNENTNLRIKALLTEFLNPEFGIENVRPYSPSQQDLLRIYEEGVLNSILELPEDIGIILGKFNQTDTLKRPTRSEILRYKLWLEQKYRSPYTGEMIPLSKLFTPAYEIEHIIPQSRYFDDSLSNKVICESEINKLKDRSLGYEFIKNHHGEKVELAFDKPVEVLSVEAYEKLVHESYSHNRSKMKKLLMEDIPDQFIERQLNDSRYISKVVKSLLSNIVREENEQEAISKNVIPCTGGITDRLKKDWGINDVWNKIVLPRFIRLNELTESTRFTSINTNNTMIPSMPLELQKGFNKKRIDHRHHAMDAIIIACANRNIVNYLNNVSASKNTKITRRDLQTLLCHKDKTDNNGNYKWVIDKPWETFTQDTLTALQKITVSFKQNLRVINKTTNHYQHYENGKKIVSNQSKGDSWAIRKSMHKETVHGEVNLRMIKTVSFNEALKKPQAIVEMDLKKKILAMLELGYDTKRIKNYFEENKDTWQDINPSKIKVYYFTKETKDRYFAVRKPIDTSFDKKKIKESITDTGIQQIMLRHLETKDNDPTLAFSPDGIDEMNRNILILNKGKKHQPIYKVRVYEKAEKFTVGQKGNKRTKFVEAAKGTNLFFAIYETEEIDKDTKKVIRKRSYSTIPLNVVIERQKQGLSSAPEDENGNLPKYILSPNDLVYVPTQEEINKGEVVMPIDRDRIYKMVDSSGITANFIPASTANLIFALPKATAEIYCNGENCIQNEYGIGSPQSKNQKAITGEMVKEICFPIKVDRLGNIIQVGSCILTN

SEQ ID NO: 53 - protein, 1323 aa, Fructobacillus fructosus
MVYDVGLDIGTGSVGWVALDENGKLARAKGKNLVGVRLFDTAQTAADRRGFRTTRRRLSRRKWRLRLLDELFSAEINEIDSSFFQRLKYSYVHPKDEENKAHYYGGYLFPTEEETKKFHRSYPTIYHLRQELMAQPNKRFDIREIYLAIHHLVKYRGHFLSSQEKITIGSTYNPEDLANAIEVYADEKGLSWELNNPEQLTEIISGEAGYGLNKSMKADEALKLFEFDNNQDKVAIKTLLAGLTGNQIDFAKLFGKDISDKDEAKLWKLKLDDEALEEKSQTILSQLTDEEIELFHAVVQAYDGFVLIGLLNGADSVSAAMVQLYDQHREDRKLLKSLAQKAGLKHKRFSEIYEQLALATDEATIKNGISTARELVEESNLSKEVKEDTLRRLDENEFLPKQRTKANSVIPHQLHLAELQKILQNQGQYYPFLLDTFEKEDGQDNKIEELLRFRIPYYVGPLVTKKDVEHAGGDADNHWVERNEGFEKSRVTPWNFDKVFNRDKAARDFIERLTGNDTYLIGEKTLPQNSLRYQLFTVLNELNNVRVNGKKFDSKTKADLINDLFKARKTVSLSALKDYLKAQGKGDVTITGLADESKFNSSLSSYNDLKKTFDAEYLENEDNQETLEKIIEIQTVFEDSKIASRELSKLPLDDDQVKKLSQTHYTGWGRLSEKLLDSKIIDERGQKVSILDKLKSTSQNFMSIINNDKYGVQAWITEQNTGSSKLTFDEKVNELTTSPANKRGIKQSFAVLNDIKKAMKEEPRRVYLEFAREDQTSVRSVPRYNQLKEKYQSKSLSEEAKVLKKTLDGNKNKMSDDRYFLYFQQQGKDMYTGRPINFERLSQDYDIDHIIPQAFTKDDSLDNRVLVSRPENARKSDSFAYTDEVQKQDGSLWTSLLKSGFINRKKYERLTKAGKYLDGQKTGFIARQLVETRQIIKNVASLIEGEYENSKAVAIRSEITADMRLLVGIKKHREINSFHHAFDALLITAAGQYMQNRYPDRDSTNVYNEFDRYTNDYLKNLRQLSSRDEVRRLKSFGFVVGTMRKGNEDWSEENTSYLRKVMMFKNILTTKKTEKDRGPLNKETIFSPKSGKKLIPLNSKRSDTALYGGYSNVYSAYMTLVRANGKNLLIKIPISIANQIEVGNLKINDYIVNNPAIKKFEKILISKLPLGQLVNEDGNLIYLASNEYRHNAKQLWLSTTDADKIASISENSSDEELLEAYDILTSENVKNRFPFFKKDIDKLSQVRDEFLDSDKRIAVIQTILRGLQIDAAYQAPVKIISKKVSDWHKLQQSGGIKLSDNSEMIYQSATGIFETRVKISDLL

SEQ ID NO: 54 - protein, 1088 aa, Bacillus smithii
MNYKMGLDIGIASVGWAVINLDLKRIEDLGVRIFDKAEHPQNGESLALPRRIARSARRRLRRRKHRLERIRRLLVSENVLTKEEMNLLFKQKKQIDVWQLRVDALERKLNNDELARVLLHLAKRRGFKSNRKSERNSKESSEFLKNIEENQSILAQYRSVGEMIVKDSKFAYHKRNKLDSYSNMIARDDLEREIKLIFEKQREFNNPVCTERLEEKYLNIWSSQRPFASKEDIEKKVGFCTFEPKEKRAPKATYTFQSFIVWEHINKLRLVSPDETRALTEIERNLLYKQAFSKNKMTYYDIRKLLNLSDDIHFKGLLYDPKSSLKQIENIRFLELDSYHKIRKCIENVYGKDGIRMFNETDIDTFGYALTIFKDDEDIVAYLQNEYITKNGKRVSNLANKVYDKSLIDELLNLSFSKFAHLSMKAIRNILPYMEQGEIYSKACELAGYNFTGPKKKEKALLLPVIPNIANPVVMRALTQSRKVVNAIIKKYGSPVSIHIELARDLSHSFDERKKIQKDQTENRKKNETAIKQLIEYELTKNPTGLDIVKFKLWSEQQGRCMYSLKPIELERLLEPGYVEVDHILPYSRSLDDSYANKVLVLTKENREKGNHTPVEYLGLGSERWKKFEKFVLANKQFSKKKKQNLLRLRYEETEEKEFKERNLNDTRYISKFFANFIKEHLKFADGDGGQKVYTINGKITAHLRSRWDFNKNREESDLHHAVDAVIVACATQGMIKKITEFYKAREQNKESAKKKEPIFPQPWPHFADELKARLSKFPQESIEAFALGNYDRKKLESLRPVFVSRMPKRSVTGAAHQETLRRCVGIDEQSGKIQTAVKTKLSDIKLDKDGHFPMYQKESDPRTYEAIRQRLLEHNNDPKKAFQEPLYKPKKNGEPGPVIRTVKIIDTKNKVVHLDGSKTVAYNSNIVRTDVFEKDGKYYCVPVYTMDIMKGTLPNKAIEANKPYSEWKEMTEEYTFQFSLFPNDLVRIVLPREKTIKTSTNEEIIIKDIFAYYKTIDSATGGLELISHDRNFSLRGVGSKTLKRFEKYQVDVLGNIHKVKGEKRVGLAAPTNQKKGKTVDSLQSVSD

SEQ ID NO: 55 - protein, 1233 aa, Mycoplasma canis
MEKKRKVTLGFDLGIASVGWAIVDSETNQVYKLGSRLFDAPDTNLERRTQRGTRRLLRRRKYRNQKFYNLVKRTEVFGLSSREAIENRFRELSIKYPNIIELKTKALSQEVCPDEIAWILHDYLKNRGYFYDEKETKEDFDQQTVESMPSYKLNEFYKKYGYFKGALSQPTESEMKDNKDLKEAFFFDFSNKEWLKEINYFFNVQKNILSETFIEEFKKIFSFTRDISKGPGSDNMPSPYGIFGEFGDNGQGGRYEHIWDKNIGKCSIFTNEQRAPKYLPSALIFNFLNELANIRLYSTDKKNIQPLWKLSSVDKLNILLNLFNLPISEKKKKLTSTNINDIVKKESIKSIMISVEDIDMIKDEWAGKEPNVYGVGLSGLNIEESAKENKFKFQDLKILNVLINLLDNVGIKFEFKDRNDIIKNLELLDNLYLFLIYQKESNNKDSSIDLFIAKNESLNIENLKLKLKEFLLGAGNEFENHNSKTHSLSKKAIDEILPKLLDNNEGWNLEAIKNYDEEIKSQIEDNSSLMAKQDKKYLNDNFLKDAILPPNVKVTFQQAILIFNKIIQKFSKDFEIDKVVIELAREMTQDQENDALKGIAKAQKSKKSLVEERLEANNIDKSVFNDKYEKLIYKIFLWISQDFKDPYTGAQISVNEIVNNKVEIDHIIPYSLCFDDSSANKVLVHKQSNQEKSNSLPYEYIKQGHSGWNWDEFTKYVKRVFVNNVDSILSKKERLKKSENLLTASYDGYDKLGFLARNLNDTRYATILFRDQLNNYAEHHLIDNKKMFKVIAMNGAVTSFIRKNMSYDNKLRLKDRSDFSHHAYDAAIIALFSNKTKTLYNLIDPSLNGIISKRSEGYWVIEDRYTGEIKELKKEDWTSIKNNVQARKIAKEIEEYLIDLDDEVFFSRKTKRKTNRQLYNETIYGIATKTDEDGITNYYKKEKFSILDDKDIYLRLLREREKFVINQSNPEVIDQIIEIIESYGKENNIPSRDEAINIKYTKNKINYNLYLKQYMRSLTKSLDQFSEEFINQMIANKTFVLYNPTKNTTRKIKFLRLVNDVKINDIRKNQVINKFNGKNNEPKAFYENINSLGAIVFKNSANNFKTLSINTQIAIFGDKNWDIEDFKTYNMEKIEKYKEIYGIDKTYNFHSFIFPGTILLDKQNKEFYYISSIQTVRDIIEIKFLNKIEFKDENKNQDTSKTPKRLMFGIKSIMNNYEQVDISPFGINKKIFE

SEQ ID NO: 56 - protein, 1498 aa, Odoribacter laneus
METTLGIDLGTNSIGLALVDQEEHQILYSGVRIFPEGINKDTIGLGEKEESRNATRRAKRQMRRQYFRKKLRKAKLLELLIAYDMCPLKPEDVRRWKNWDKQQKSTVRQFPDTPAFREWLKQNPYELRKQAVTEDVTRPELGRILYQMIQRRGFLSSRKGKEEGKIFTGKDRMVGIDETRKNLQKQTLGAYLYDIAPKNGEKYRFRTERVRARYTLRDMYIREFEIIWQRQAGHLGLAHEQATRKKNIFLEGSATNVRNSKLITHLQAKYGRGHVLIEDTRITVTFQLPLKEVLGGKIEIEEEQLKFKSNESVLFWQRPLRSQKSLLSKCVFEGRNFYDPVHQKWIIAGPTPAPLSHPEFEEFRAYQFINNIIYGKNEHLTAIQREAVFELMCTESKDFNFEKIPKHLKLFEKFNFDDTTKVPACTTISQLRKLFPHPVWEEKREEIWHCFYFYDDNTLLFEKLQKDYALQTNDLEKIKKIRLSESYGNVSLKAIRRINPYLKKGYAYSTAVLLGGIRNSFGKRFEYFKEYEPEIEKAVCRILKEKNAEGEVIRKIKDYLVHNRFGFAKNDRAFQKLYHHSQAITTQAQKERLPETGNLRNPIVQQGLNELRRTVNKLLATCREKYGPSFKFDHIHVEMGRELRSSKTEREKQSRQIRENEKKNEAAKVKLAEYGLKAYRDNIQKYLLYKEIEEKGGTVCCPYTGKTLNISHTLGSDNSVQIEHIIPYSISLDDSLANKTLCDATFNREKGELTPYDFYQKDPSPEKWGASSWEEIEDRAFRLLPYAKAQRFIRRKPQESNEFISRQLNDTRYISKKAVEYLSAICSDVKAFPGQLTAELRHLWGLNNILQSAPDITFPLPVSATENHREYYVITNEQNEVIRLFPKQGETPRTEKGELLLTGEVERKVFRCKGMQEFQTDVSDGKYWRRIKLSSSVTWSPLFAPKPISADGQIVLKGRIEKGVFVCNQLKQKLKTGLPDGSYWISLPVISQTFKEGESVNNSKLTSQQVQLFGRVREGIFRCHNYQCPASGADGNFWCTLDTDTAQPAFTPIKNAPPGVGGGQIILTGDVDDKGIFHADDDLHYELPASLPKGKYYGIFTVESCDPTLIPIELSAPKTSKGENLIEGNIWVDEHTGEVRFDPKKNREDQRHHAIDAIVIALSSQSLFQRLSTYNARRENKKRGLDSTEHFPSPWPGFAQDVRQSVVPLLVSYKQNPKTLCKISKTLYKDGKKIHSCGNAVRGQLHKETVYGQRTAPGATEKSYHIRKDIRELKTSKHIGKVVDITIRQMLLKHLQENYHIDITQEFNIPSNAFFKEGVYRIFLPNKHGEPVPIKKIRMKEELGNAERLKDNINQYVNPRNNHHVMIYQDADGNLKEEIVSFWSVIERQNQGQPIYQLPREGRNIVSILQINDTFLIGLKEEEPEVYRNDLSTLSKHLYRVQKLSGMYYTFRHHLASTLNNEREEFRIQSLEAWKRANPVKVQIDEIGRITFLNGPLC

SEQ ID NO: 57 - protein, 1101 aa, Akkermansia muciniphila
MSRSLTFSFDIGYASIGWAVIASASHDDADPSVCGCGTVLFPKDDCQAFKRREYRRLRRNIRSRRVRIERIGRLLVQAQIITPEMKETSGHPAPFYLASEALKGHRTLAPIELWHVLRWYAHNRGYDNNASWSNSLSEDGGNGEDTERVKHAQDLMDKHGTATMAETICRELKLEEGKADAPMEVSTPAYKNLNTAFPRLIVEKEVRRILELSAPLIPGLTAEIIELIAQHHPLTTEQRGVLLQHGIKLARRYRGSLLFGQLIPRFDNRIISRCPVTWAQVYEAELKKGNSEQSARERAEKLSKVPTANCPEFYEYRMARILCNIRADGEPLSAEIRRELMNQARQEGKLTKASLEKAISSRLGKETETNVSNYFTLHPDSEEALYLNPAVEVLQRSGIGQILSPSVYRIAANRLRRGKSVTPNYLLNLLKSRGESGEALEKKIEKESKKKEADYADTPLKPKYATGRAPYARTVLKKVVEEILDGEDPTRPARGEAHPDGELKAHDGCLYCLLDTDSSVNQHQKERRLDTMTNNHLVRHRMLILDRLLKDLIQDFADGQKDRISRVCVEVGKELTTFSAMDSKKIQRELTLRQKSHTDAVNRLKRKLPGKALSANLIRKCRIAMDMNWTCPFTGATYGDHELENLELEHIVPHSFRQSNALSSLVLTWPGVNRMKGQRTGYDFVEQEQENPVPDKPNLHICSLNNYRELVEKLDDKKGHEDDRRRKKKRKALLMVRGLSHKHQSQNHEAMKEIGMTEGMMTQSSHLMKLACKSIKTSLPDAHIDMIPGAVTAEVRKAWDVFGVFKELCPEAADPDSGKILKENLRSLTHLHHALDACVLGLIPYIIPAHHNGLLRRVLAMRRIPEKLIPQVRPVANQRHYVLNDDGRMMLRDLSASLKENIREQLMEQRVIQHVPADMGGALLKETMQRVLSVDGSGEDAMVSLSKKKDGKKEKNQVKASKLVGVFPEGPSKLKALKAAIEIDGNYGVALDPKPVVIRHIKVFKRIMALKEQNGGKPVRILKKGMLIHLTSSKDPKHAGVWRIESIQDSKGGVKLDLQRAHCAVPKNKTHECNWREVDLISLLKKYQMKRYPTSYTGTPR

SEQ ID NO: 58 - protein, 1079 aa, Dinoroseobacter shibae
MRLGLDIGTSSIGWWLYETDGAGSDARITGVVDGGVRIFSDGRDPKSGASLAVDRRAARAMRRRRDRYLRRRATLMKVLAETGLMPADPAEAKALEALDPFALRAAGLDEPLPLPHLGRALFHLNQRRGFKSNRKTDRGDNESGKIKDATARLDMEMMANGARTYGEFLHKRRQKATDPRHVPSVRTRLSIANRGGPDGKEEAGYDFYPDRRHLEEEFHKLWAAQGAHHPELTETLRDLLFEKIFFQRPLKEPEVGLCLFSGHHGVPPKDPRLPKAHPLTQRRVLYETVNQLRVTADGREARPLTREERDQVIHALDNKKPTKSLSSMVLKLPALAKVLKLRDGERFTLETGVRDAIACDPLRASPAHPDRFGPRWSILDADAQWEVISRIRRVQSDAEHAALVDWLTEAHGLDRAHAEATAHAPLPDGYGRLGLTATTRILYQLTADVVTYADAVKACGWHHSDGRTGECFDRLPYYGEVLERHVIPGSYHPDDDDITRFGRITNPTVHIGLNQLRRLVNRIIETHGKPHQIVVELARDLKKSEEQKRADIKRIRDTTEAAKKRSEKLEELEIEDNGRNRMLLRLWEDLNPDDAMRRFCPYTGTRISAAMIFDGSCDVDHILPYSRTLDDSFPNRTLCLREANRQKRNQTPWQAWGDTPHWHAIAANLKNLPENKRWRFAPDAMTRFEGENGFLDRALKDTQYLARISRSYLDTLFTKGGHVWVVPGRFTEMLRRHWGLNSLLSDAGRGAVKAKNRTDHRHHAIDAAVIAATDPGLLNRISRAAGQGEAAGQSAELIARDTPPPWEGFRDDLRVRLDRIIVSHRADHGRIDHAARKQGRDSTAGQLHQETAYSIVDDIHVASRTDLLSLKPAQLLDEPGRSGQVRDPQLRKALRVATGGKTGKDFENALRYFASKPGPYQAIRRVRIIKPLQAQARVPVPAQDPIKAYQGGSNHLFEIWRLPDGEIEAQVITSFEAHTLEGEKRPHPAAKRLLRVHKGDMVALERDGRRVVGHVQKMDIANGLFIVPHNEANADTRNNDKSDPFKWIQIGARPAIASGIRRVSVDEIGRLRDGGTRPI

SEQ ID NO: 59 - protein, 1059 aa, Wolinella succinogenes
MIERILGVDLGISSLGWAIVEYDKDDEAANRIIDCGVRLFTAAETPKKKESPNKARREARGIRRVLNRRRVRMNMIKKLFLRAGLIQDVDLDGEGGMFYSKANRADVWELRHDGLYRLLKGDELARVLIHIAKHRGYKFIGDDEADEESGKVKKAGVVLRQNFEAAGCRTVGEWLWRERGANGKKRNKHGDYEISIHRDLLVEEVEAIFVAQQEMRSTIATDALKAAYREIAFFVRPMQRIEKMVGHCTYFPEERRAPKSAPTAEKFIAISKFFSTVIIDNEGWEQKIIERKTLEELLDFAVSREKVEFRHLRKFLDLSDNEIFKGLHYKGKPKTAKKREATLFDPNEPTELEFDKVEAEKKAWISLRGAAKLREALGNEFYGRFVALGKHADEATKILTYYKDEGQKRRELTKLPLEAEMVERLVKIGFSDFLKLSLKAIRDILPAMESGARYDEAVLMLGVPHKEKSAILPPLNKTDIDILNPTVIRAFAQFRKVANALVRKYGAFDRVHFELAREINTKGEIEDIKESQRKNEKERKEAADWIAETSFQVPLTRKNILKKRLYIQQDGRCAYTGDVIELERLFDEGYCEIDHILPRSRSADDSFANKVLCLARANQQKTDRTPYEWFGHDAARWNAFETRTSAPSNRVRTGKGKIDRLLKKNFDENSEMAFKDRNLNDTRYMARAIKTYCEQYWVFKNSHTKAPVQVRSGKLTSVLRYQWGLESKDRESHTHHAVDAIIIAFSTQGMVQKLSEYYRFKETHREKERPKLAVPLANFRDAVEEATRIENTETVKEGVEVKRLLISRPPRARVTGQAHEQTAKPYPRIKQVKNKKKWRLAPIDEEKFESFKADRVASANQKNFYETSTIPRVDVYHKKGKFHLVPIYLHEMVLNELPNLSLGTNPEAMDENFFKFSIFKDDLISIQTQGTPKKPAKIIMGYFKNMHGANMVLSSINNSPCEGFTCTPVSMDKKHKDKCKLCPEENRIAGRCLQGFLDYWSQEGLRPPRKEFECDQGVKFALDVKKYQIDPLGYYYEVKQEKRLGTIPQMRSAKKLVKK

SEQ ID NO: 60 - protein, 1428 aa, Parasutterella excrementihominis
MGKTHIIGVGLDLGGTYTGTFITSHPSDEAEHRDHSSAFTVVNSEKLSFSSKSRTAVRHRVRSYKGFDLRRRLLLLVAEYQLLQKKQTLAPEERENLRIALSGYLKRRGYARTEAETDTSVLESLDPSVFSSAPSFTNFFNDSEPLNIQWEAIANSPETTKALNKELSGQKEADFKKYIKTSFPEYSAKEILANYVEGRRAILDASKYIANLQSLGHKHRSKYLSDILQDMKRDSRITRLSEAFGSTDNLWRIIGNISNLQERAVRWYFNDAKFEQGQEQLDAVKLKNVLVRALKYLRSDDKEWSASQKQIIQSLEQSGDVLDVLAGLDPDRTIPPYEDQNNRRPPEDQTLYLNPKALSSEYGEKWKSWANKFAGAYPLLTEDLTEILKNTDRKSRIKIRSDVLPDSDYRLAYILQRAFDRSIALDECSIRRTAEDFENGVVIKNEKLEDVLSGHQLEEFLEFANRYYQETAKAKNGLWFPENALLERADLHPPMKNKILNVIVGQALGVSPAEGTDFIEEIWNSKVKGRSTVRSICNAIENERKTYGPYFSEDYKFVKTALKEGKTEKELSKKFAAVIKVLKMVSEVVPFIGKELRLSDEAQSKFDNLYSLAQLYNLIETERNGFSKVSLAAHLENAWRMTMTDGSAQCCRLPADCVRPFDGFIRKAIDRNSWEVAKRIAEEVKKSVDFTNGTVKIPVAIEANSFNFTASLTDLKYIQLKEQKLKKKLEDIQRNEENQEKRWLSKEERIRADSHGICAYTGRPLDDVGEIDHIIPRSLTLKKSESIYNSEVNLIFVSAQGNQEKKNNIYLLSNLAKNYLAAVFGTSDLSQITNEIESTVLQLKAAGRLGYFDLLSEKERACARHALFLNSDSEARRAVIDVLGSRRKASVNGTQAWFVRSIFSKVRQALAAWTQETGNELIFDAISVPAADSSEMRKRFAEYRPEFRKPKVQPVASHSIDAMCIYLAACSDPFKTKRMGSQLAIYEPINFDNLFTGSCQVIQNTPRNFSDKTNIANSPIFKETIYAERFLDIIVSRGEIFIGYPSNMPFEEKPNRISIGGKDPFSILSVLGAYLDKAPSSEKEKLTIYRVVKNKAFELFSKVAGSKFTAEEDKAAKILEALHFVTVKQDVAATVSDLIKSKKELSKDSIENLAKQKGCLKKVEYSSKEFKFKGSLIIPAAVEWGKVLWNVFKENTAEELKDENALRKALEAAWPSSFGTRNLHSKAKRVFSLPVVATQSGAVRIRRKTAFGDFVYQSQDTNNLYSSFPVKNGKLDWSSPIIHPALQNRNLTAYGYRFVDHDRSISMSEFREVYNKDDLMRIELAQGTSSRRYLRVEMPGEKFLAWFGENSISLGSSFKFSVSEVFDNKIYTENAEFTKFLPKPREDNKHNGTIFFELVGPRVIFNYIVGGAASSLKEIFSEAGKERS

SEQ ID NO: 61 - protein, 1421 aa, Streptococcus sanguinis
MTKFNKNYSIGLDIGVSSVGYAVVTEDYRVPAFKFKVLGNTEKEKIKKNLIGSTTFVSAQPAKGTRVFRVNRRRIDRRNHRITYLRDIFQKEIEKVDKNFYRRLDESFRVLGDKSEDLQIKQPFFGDKELETAYHKKYPTIYHLRKHLADADKNSPVADIREVYMAISHILKYRGHFLTLDKINPNNINMQNSWIDFIESCQEVFDLEISDESKNIADIFKSSENRQEKVKKILPYFQQELLKKDKSIFKQLLQLLFGLKTKFKDCFELEEEPDLNFSKENYDENLENFLGSLEEDFSDVFAKLKVLRDTILLSGMLTYTGATHARFSATMVERYEEHRKDLQRFKFFIKQNLSEQDYLDIFGRKTQNGFDVDKETKGYVGYITNKMVLTNPQKQKTIQQNFYDYISGKITGIEGAEYFLNKISDGTFLRKLRTSDNGAIPNQIHAYELEKIIERQGKDYPFLLENKDKLLSILTFKIPYYVGPLAKGSNSRFAWIKRATSSDILDDNDEDTRNGKIRPWNYQKLINMDETRDAFITNLIGNDIILLNEKVLPKRSLIYEEVMLQNELTRVKYKDKYGKAHFFDSELRQNIINGLFKNNSKRVNAKSLIKYLSDNHKDLNAIEIVSGVEKGKSFNSTLKTYNDLKTIFSEELLDSEIYQKELEEIIKVITVFDDKKSIKNYLTKFFGHLEILDEEKINQLSKLRYSGWGRYSAKLLLDIRDEDTGFNLLQFLRNDEENRNLTKLISDNTLSFEPKIKDIQSKSTIEDDIFDEIKKLAGSPAIKRGILNSIKIVDELVQIIGYPPHNIVIEMARENMTTEEGQKKAKTRKTKLESALKNIENSLLENGKVPHSDEQLQSEKLYLYYLQNGKDMYTLDKTGSPAPLYLDQLDQYEVDHIIPYSFLPIDSIDNKVLTHRENNQQKLNNIPDKETVANMKPFWEKLYNAKLISQTKYQRLTTSERTPDGVLTESMKAGFIERQLVETRQIIKHVARILDNRFSDTKIITLKSQLITNFRNTFHIAKIRELNDYHHAHDAYLAVVVGQTLLKVYPKLAPELIYGHHAHFNRHEENKATLRKHLYSNIMRFFNNPDSKVSKDIWDCNRDLPIIKDVIYNSQINFVKRTMIKKGAFYNQNPVGKFNKQLAANNRYPLKTKALCLDTSIYGGYGPMNSALSIIIIAERFNEKKGKIETVKEFHDIFIIDYEKFNNNPFQFLNDTSENGFLKKNNINRVLGFYRIPKYSLMQKIDGTRMLFESKSNLHKATQFKLTKTQNELFFHMKRLLTKSNLMDLKSKSAIKESQNFILKHKEEFDNISNQLSAFSQKMLGNTTSLKNLIKGYNERKIKEIDIRDETIKYFYDNFIKMFSFVKSGAPKDINDFFDNKCTVARMRPKPDKKLLNATLIHQSITGLYETRIDLSKLGED

SEQ ID NO: 62 - protein, 1181 aa, Actinomyces sp.
MLHCIAVIRVPPSEEPGFFETHADSCALCHHGCMTYAANDKAIRYRVGIDVGLRSIGFCAVEVDDEDHPIRILNSVVHVHDAGTGGPGETESLRKRSGVAARARRRGRAEKQRLKKLDVLLEELGWGVSSNELLDSHAPWHIRKRLVSEYIEDETERRQCLSVAMAHIARHRGWRNSFSKVDTLLLEQAPSDRMQGLKERVEDRTGLQFSEEVTQGELVATLLEHDGDVTIRGFVRKGGKATKVHGVLEGKYMQSDLVAELRQICRTQRVSETTFEKLVLSIFHSKEPAPSAARQRERVGLDELQLALDPAAKQPRAERAHPAFQKFKVVATLANMRIREQSAGERSLTSEELNRVARYLLNHTESESPTWDDVARKLEVPRHRLRGSSRASLETGGGLTYPPVDDTTVRVMSAEVDWLADWWDCANDESRGHMIDAISNGCGSEPDDVEDEEVNELISSATAEDMLKLELLAKKLPSGRVAYSLKTLREVTAAILETGDDLSQAITRLYGVDPGWVPTPAPIEAPVGNPSVDRVLKQVARWLKFASKRWGVPQTVNIEHTREGLKSASLLEEERERWERFEARREIRQKEMYKRLGISGPFRRSDQVRYEILDLQDCACLYCGNEINFQTFEVDHIIPRVDASSDSRRTNLAAVCHSCNSAKGGLAFGQWVKRGDCPSGVSLENAIKRVRSWSKDRLGLTEKAMGKRKSEVISRLKTEMPYEEFDGRSMESVAWMAIELKKRIEGYFNSDRPEGCAAVQVNAYSGRLTACARRAAHVDKRVRLIRLKGDDGHHKNRFDRRNHAMDALVIALMTPAIARTIAVREDRREAQQLTRAFESWKNFLGSEERMQDRWESWIGDVEYACDRLNELIDADKIPVTENLRLRNSGKLHADQPESLKKARRGSKRPRPQRYVLGDALPADVINRVTDPGLWTALVRAPGFDSQLGLPADLNRGLKLRGKRISADFPIDYFPTDSPALAVQGGYVGLEFHHARLYRIIGPKEKVKYALLRVCAIDLCGIDCDDLFEVELKPSSISMRTADAKLKEAMGNGSAKQIGWLVLGDEIQIDPTKFPKQSIGKFLKECGPVSSWRVSALDTPSKITLKPRLLSNEPLLKTSRVGGHESDLVVAECVEKIMKKTGWVVEINALCQSGLIRVIRRNALGEVRTSPKSGLPISLNLR

SEQ ID NO: 63 - protein, 1059 aa, Rhodovulum sp.
MGIRFAFDLGTNSIGWAVWRTGPGVFGEDTAASLDGSGVLIFKDGRNPKDGQSLATMRRVPRQSRKRRDRFVLRRRDLLAALRKAGLFPVDVEEGRRLAATDPYHLRAKALDESLTPHEMGRVIFHLNQRRGFRSNRKADRQDREKGKIAEGSKRLAETLAATNCRTLGEFLWSRHRGTPRTRSPTRIRMEGEGAKALYAFYPTREMVRAEFERLWTAQSRFAPDLLTPERHEEIAGILFRQRDLAPPKIGCCTFEPSERRLPRALPSVEARGIYERLAHLRITTGPVSDRGLTRPERDVLASALLAGKSLTFKAVRKTLKILPHALVNFEEAGEKGLDGALTAKLLSKPDHYGAAWHGLSFAEKDTFVGKLLDEADEERLIRRLVTENRLSEDAARRCASIPLADGYGRLGRTANTEILAALVEETDETGTVVTYAEAVRRAGERTGRNWHHSDERDGVILDRLPYYGEILQRHVVPGSGEPEEKNEAARWGRLANPTVHIGLNQLRKVVNRLIAAHGRPDQIVVELARELKLNREQKERLDRENRKNREENERRTAILAEHGQRDTAENKIRLRLFEEQARANAGIALCPYTGRAIGIAELFTSEVEIDHILPVSLTLDDSLANRVLCRREANREKRRQTPFQAFGATPAWNDIVARAAKLPPNKRWRFDPAALERFEREGGFLGRQLNETKYLSRLAKIYLGKICDPDRVYVTPGTLTGLLRARWGLNSILSDSNFKNRSDHRHHAVDAVVIGVLTRGMIQRIAHDAARAEDQDLDRVFRDVPVPFEDFRDHVRERVSTITVAVKPEHGKGGALHEDTSYGLVPDTDPNAALGNLVVRKPIRSLTAGEVDRVRDRALRARLGALAAPFRDESGRVRDAKGLAQALEAFGAENGIRRVRILKPDASVVTIADRRTGVPYRAVAPGENHHVDIVQMRDGSWRGFAASVFEVNRPGWRPEWEVKKLGGKLVMRLHKGDMVELSDKDGQRRVKVVQQIEISANRVRLSPHNDGGKLQDRHADADDPFRWDLATIPLLKDRGCVAVRVDPIGVVTLRRSNV

SEQ ID NO: 64 - protein, 1420 aa, Bifidobacterium bifidum
MSRKNYVDDYAISLDIGNASVGWSAFTPNYRLVRAKGHELIGVRLFDPADTAESRRMARTTRRRYSRRRWRLRLLDALFDQALSEIDPSFLARRKYSWVHPDDENNADCWYGSVLFDSNEQDKRFYEKYPTIYHLRKALMEDDSQHDIREIYLAIHHMVKYRGNFLVEGTLESSNAFKEDELLKLLGRITRYEMSEGEQNSDIEQDDENKLVAPANGQLADALCATRGSRSMRVDNALEALSAVNDLSREQRAIVKAIFAGLEGNKLDLAKIFVSKEFSSENKKILGIYFNKSDYEEKCVQIVDSGLLDDEEREFLDRMQGQYNAIALKQLLGRSTSVSDSKCASYDAHRANWNLIKLQLRTKENEKDINENYGILVGWKIDSGQRKSVRGESAYENMRKKANVFFKKMIETSDLSETDKNRLIHDIEEDKLFPIQRDSDNGVIPHQLHQNELKQIIKKQGKYYPFLLDAFEKDGKQINKIEGLLTFRVPYFVGPLVVPEDLQKSDNSENHWMVRKKKGEITPWNFDEMVDKDASGRKFIERLVGTDSYLLGEPTLPKNSLLYQEYEVLNELNNVRLSVRTGNHWNDKRRMRLGREEKTLLCQRLFMKGQTVTKRTAENLLRKEYGRTYELSGLSDESKFTSSLSTYGKMCRIFGEKYVNEHRDLMEKIVELQTVFEDKETLLHQLRQLEGISEADCALLVNTHYTGWGRLSRKLLTTKAGECKISDDFAPRKHSIIEIMRAEDRNLMEIITDKQLGFSDWIEQENLGAENGSSLMEVVDDLRVSPKVKRGIIQSIRLIDDISKAVGKRPSRIFLELADDIQPSGRTISRKSRLQDLYRNANLGKEFKGIADELNACSDKDLQDDRLFLYYTQLGKDMYTGEELDLDRLSSAYDIDHIIPQAVTQNDSIDNRVLVARAENARKTDSFTYMPQIADRMRNFWQILLDNGLISRVKFERLTRQNEFSEREKERFVQRSLVETRQIMKNVATLMRQRYGNSAAVIGLNAELTKEMHRYLGFSHKNRDINDYHHAQDALCVGIAGQFAANRGFFADGEVSDGAQNSYNQYLRDYLRGYREKLSAEDRKQGRAFGFIVGSMRSQDEQKRVNPRTGEVVWSEEDKDYLRKVMNYRKMLVTQKVGDDFGALYDETRYAATDPKGIKGIPFDGAKQDTSLYGGFSSAKPAYAVLIESKGKTRLVNVTMQEYSLLGDRPSDDELRKVLAKKKSEYAKANILLRHVPKMQLIRYGGGLMVIKSAGELNNAQQLWLPYEEYCYFDDLSQGKGSLEKDDLKKLLDSILGSVQCLYPWHRFTEEELADLHVAFDKLPEDEKKNVITGIVSALHADAKTANLSIVGMTGSWRRMNNKSGYTFSDEDEFIFQSPSGLFEKRVTVGELKRKAKKEVNSKYRTNEKRLPTLSGASQP

SEQ ID NO: 65 - protein, 1153 aa, Barnesiella intestinihominis
MKNILGLDLGLSSIGWSVIRENSEEQELVAMGSRVVSLTAAELSSFTQGNGVSINSQRTQKRTQRKGYDRYQLRRTLLRNKLDTLGMLPDDSLSYLPKLQLWGLRAKAVTQRIELNELGRVLLHLNQKRGYKSIKSDFSGDKKITDYVKTVKTRYDELKEMRLTIGELFFRRLTENAFFRCKEQVYPRQAYVEEFDCIMNCQRKFYPDILTDETIRCIRDEIIYYQRPLKSCKYLVSRCEFEKRFYLNAAGKKTEAGPKVSPRTSPLFQVCRLWESINNIVVKDRRNEIVFISAEQRAALFDFLNTHEKLKGSDLLKLLGLSKTYGYRLGEQFKTGIQGNKTRVEIERALGNYPDKKRLLQFNLQEESSSMVNTETGEIIPMISLSFEQEPLYRLWHVLYSIDDREQLQSVLRQKFGIDDDEVLERLSAIDLVKAGFGNKSSKAIRRILPFLQLGMNYAEACEAAGYNHSNNYTKAENEARALLDRLPAIKKNELRQPVVEKILNQMVNVVNALMEKYGRFDEIRVELARELKQSKEERSNTYKSINKNQRENEQIAKRIVEYGVPTRSRIQKYKMWEESKHCCIYCGQPVDVGDFLRGFDVEVEHIIPKSLYFDDSFANKVCSCRSCNKEKNNRTAYDYMKSKGEKALSDYVERVNTMYTNNQISKTKWQNLLTPVDKISIDFIDRQLRESQYIARKAKEILTSICYNVTATSGSVTSFLRHVWGWDTVLHDLNFDRYKKVGLTEVIEVNHRGSVIRREQIKDWSKRFDHRHHAIDALTIACTKQAYIQRLNNLRAEEGPDFNKMSLERYIQSQPHFSVAQVREAVDRILVSFRAGKRAVTPGKRYIRKNRKRISVQSVLIPRGALSEESVYGVIHVWEKDEQGHVIQKQRAVMKYPITSINREMLDKEKVVDKRIHRILSGRLAQYNDNPKEAFAKPVYIDKECRIPIRTVRCFAKPAINTLVPLKKDDKGNPVAWVNPGNNHHVAIYRDEDGKYKERTVTFWEAVDRCRVGIPAIVTQPDTIWDNILQRNDISENVLESLPDVKWQFVLSLQQNEMFILGMNEEDYRYAMDQQDYALLNKYLYRVQKLSKSDYSFRYHTETSVEDKYDGKPNLKLSMQMGKLKRVSIKSLLGLNPHKVHISVLGEIKEIS

SEQ ID NO: 66 - protein, 1052 aa, Aminomonas paucivorans
MIGEHVRGGCLFDDHWTPNWGAFRLPNTVRTFTKAENPKDGSSLAEPRRQARGLRRRLRRKTQRLEDLRRLLAKEGVLSLSDLETLFRETPAKDPYQLRAEGLDRPLSFPEWVRVLYHITKHRGFQSNRRNPVEDGQERSRQEEEGKLLSGVGENERLLREGGYRTAGEMLARDPKFQDHRRNRAGDYSHTLSRSLLLEEARRLFQSQRTLGNPHASSNLEEAFLHLVAFQNPFASGEDIRNKAGHCSLEPDQIRAPRRSASAETFMLLQKTGNLRLIHRRTGEERPLTDKEREQIHLLAWKQEKVTHKTLRRHLEIPEEWLFTGLPYHRSGDKAEEKLFVHLAGIHEIRKALDKGPDPAVWDTLRSRRDLLDSIADTLTFYKNEDEILPRLESLGLSPENARALAPLSFSGTAHLSLSALGKLLPHLEEGKSYTQARADAGYAAPPPDRHPKLPPLEEADWRNPVVFRALTQTRKVVNALVRRYGPPWCIHLETARELSQPAKVRRRIETEQQANEKKKQQAEREFLDIVGTAPGPGDLLKMRLWREQGGFCPYCEEYLNPTRLAEPGYAEMDHILPYSRSLDNGWHNRVLVHGKDNRDKGNRTPFEAFGGDTARWDRLVAWVQASHLSAPKKRNLLREDFGEEAERELKDRNLTDTRFITKTAATLLRDRLTFHPEAPKDPVMTLNGRLTAFLRKQWGLHKNRKNGDLHHALDAAVLAVASRSFVYRLSSHNAAWGELPRGREAENGFSLPYPAFRSEVLARLCPTREEILLRLDQGGVGYDEAFRNGLRPVFVSRAPSRRLRGKAHMETLRSPKWKDHPEGPRTASRIPLKDLNLEKLERMVGKDRDRKLYEALRERLAAFGGNGKKAFVAPFRKPCRSGEGPLVRSLRIFDSGYSGVELRDGGEVYAVADHESMVRVDVYAKKNRFYLVPVYVADVARGIVKNRAIVAHKSEEEWDLVDGSFDFRFSLFPGDLVEIEKKDGAYLGYYKSCHRGDGRLLLDRHDRMPRESDCGTFYVSTRKDVLSMSKYQVDPLGEIRLVGSEKPPFVL

SEQ ID NO: 67 - protein, 1062 aa, Ralstonia syzygii
MAEKQHRWGLDIGTNSIGWAVIALIEGRPAGLVATGSRIFSDGRNPKDGSSLAVERRGPRQMRRRRDRYLRRRDRFMQALINVGLMPGDAAARKALVTENPYVLRQRGLDQALTLPEFGRALFHLNQRRGFQSNRKTDRATAKESGKVKNAIAAFRAGMGNARTVGEALARRLEDGRPVRARMVGQGKDEHYELYIAREWIAQEFDALWASQQRFHAEVLADAARDRLRAILLFQRKLLPVPVGKCFLEPNQPRVAAALPSAQRFRLMQELNHLRVMTLADKRERPLSFQERNDLLAQLVARPKCGFDMLRKIVFGANKEAYRFTIESERRKELKGCDTAAKLAKVNALGTRWQALSLDEQDRLVCLLLDGENDAVLADALREHYGLTDAQIDTLLGLSFEDGHMRLGRSALLRVLDALESGRDEQGLPLSYDKAVVAAGYPAHTADLENGERDALPYYGELLWRYTQDAPTAKNDAERKFGKIANPTVHIGLNQLRKLVNALIQRYGKPAQIVVELARNLKAGLEEKERIKKQQTANLERNERIRQKLQDAGVPDNRENRLRMRLFEELGQGNGLGTPCIYSGRQISLQRLFSNDVQVDHILPFSKTLDDSFANKVLAQHDANRYKGNRGPFEAFGANRDGYAWDDIRARAAVLPRNKRNRFAETAMQDWLHNETDFLARQLTDTAYLSRVARQYLTAICSKDDVYVSPGRLTAMLRAKWGLNRVLDGVMEEQGRPAVKNRDDHRHHAIDAVVIGATDRAMLQQVATLAARAREQDAERLIGDMPTPWPNFLEDVRAAVARCVVSHKPDHGPEGGLHNDTAYGIVAGPFEDGRYRVRHRVSLFDLKPGDLSNVRCDAPLQAELEPIFEQDDARAREVALTALAERYRQRKVWLEELMSVLPIRPRGEDGKTLPDSAPYKAYKGDSNYCYELFINERGRWDGELISTFRANQAAYRRFRNDPARFRRYTAGGRPLLMRLCINDYIAVGTAAERTIFRVVKMSENKITLAEHFEGGTLKQRDADKDDPFKYLTKSPGALRDLGARRIFVDLIGRVLDPGIKGD

SEQ ID NO: 68 - protein, 1329 aa, Catenibacterium mitsuokai
IVDYCIGLDLGTGSVGWAVVDMNHRLMKRNGKHLWGSRLFSNAETAANRRASRSIRRRYNKRRERIRLLRAILQDMVLEKDPTFFIRLEHTSFLDEEDKAKYLGTDYKDNYNLFIDEDFNDYTYYHKYPTIYHLRKALCESTEKADPRLIYLALHHIVKYRGNFLYEGQKFNMDASNIEDKLSDIFTQFTSFNNIPYEDDEKKNLEILEILKKPLSKKAKVDEVMTLIAPEKDYKSAFKELVTGIAGNKMNVTKMILCEPIKQGDSEIKLKFSDSNYDDQFSEVEKDLGEYVEFVDALHNVYSWVELQTIMGATHTDNASISEAMVSRYNKHHDDLKLLKDCIKNNVPNKYFDMFRNDSEKSKGYYNYINRPSKAPVDEFYKYVKKCIEKVDTPEAKQILNDIELENFLLKQNSRTNGSVPYQMQLDEMIKIIDNQAEYYPILKEKREQLLSILTFRIPYYFGPLNETSEHAWIKRLEGKENQRILPWNYQDIVDVDATAEGFIKRMRSYCTYFPDEEVLPKNSLIVSKYEVYNELNKIRVDDKLLEVDVKNDIYNELFMKNKTVTEKKLKNWLVNNQCCSKDAEIKGFQKENQFSTSLTPWIDFTNIFGKIDQSNFDLIENIIYDLTVFEDKKIMKRRLKKKYALPDDKVKQILKLKYKDWSRLSKKLLDGIVADNRFGSSVTVLDVLEMSRLNLMEIINDKDLGYAQMIEEATSCPEDGKFTYEEVERLAGSPALKRGIWQSLQIVEEITKVMKCRPKYIYIEFERSEEAKERTESKIKKLENVYKDLDEQTKKEYKSVLEELKGFDNTKKISSDSLFLYFTQLGKCMYSGKKLDIDSLDKYQIDHIVPQSLVKDDSFDNRVLVVPSENQRKLDDLVVPFDIRDKMYRFWKLLFDHELISPKKFYSLIKTEYTERDEERFINRQLVETRQITKNVTQIIEDHYSTTKVAAIRANLSHEFRVKNHIYKNRDINDYHHAHDAYIVALIGGFMRDRYPNMHDSKAVYSEYMKMFRKNKNDQKRWKDGFVINSMNYPYEVDGKLIWNPDLINEIKKCFYYKDCYCTTKLDQKSGQLFNLTVLSNDAHADKGVTKAVVPVNKNRSDVHKYGGFSGLQYTIVAIEGQKKKGKKTELVKKISGVPLHLKAASINEKINYIEEKEGLSDVRIIKDNIPVNQMIEMDGGEYLLTSPTEYVNARQLVLNEKQCALIADIYNAIYKQDYDNLDDILMIQLYIELTNKMKVLYPAYRGIAEKFESMNENYVVISKEEKANIIKQMLIVMHRGPQNGNIVYDDFKISDRIGRLKTKNHNLNNIVFISQSPTGIYTKKYKL

SEQ ID NO: 69 - protein, 1314 aa, Mycoplasma synoviae
MLRLYCANNLVLNNVQNLWKYLLLLIFDKKIIFLFKIKVILIRRYMENNNKEKIVIGFDLGVASVGWSIVNAETKEVIDLGVRLFSEPEKADYRRAKRTTRRLLRRKKFKREKFHKLILKNAEIFGLQSRNEILNVYKDQSSKYRNILKLKINALKEEIKPSELVWILRDYLQNRGYFYKNEKLTDEFVSNSFPSKKLHEHYEKYGFFRGSVKLDNKLDNKKDKAKEKDEEEESDAKKESEELIFSNKQWINEIVKVFENQSYLTESFKEEYLKLFNYVRPFNKGPGSKNSRTAYGVFSTDIDPETNKFKDYSNIWDKTIGKCSLFEEEIRAPKNLPSALIFNLQNEICTIKNEFTEFKNWWLNAEQKSEILKFVFTELFNWKDKKYSDKKFNKNLQDKIKKYLLNFALENFNLNEEILKNRDLENDTVLGLKGVKYYEKSNATADAALEFSSLKPLYVFIKFLKEKKLDLNYLLGLENTEILYFLDSIYLAISYSSDLKERNEWFKKLLKELYPKIKNNNLEIIENVEDIFEITDQEKFESFSKTHSLSREAFNHIIPLLLSNNEGKNYESLKHSNEELKKRTEKAELKAQQNQKYLKDNFLKEALVPLSVKTSVLQAIKIFNQIIKNFGKKYEISQVVIEMARELTKPNLEKLLNNATNSNIKILKEKLDQTEKFDDFTKKKFIDKIENSVVFRNKLFLWFEQDRKDPYTQLDIKINEIEDETEIDHVIPYSKSADDSWFNKLLVKKSTNQLKKNKTVWEYYQNESDPEAKWNKFVAWAKRIYLVQKSDKESKDNSEKNSIFKNKKPNLKFKNITKKLFDPYKDLGFLARNLNDTRYATKVFRDQLNNYSKHHSKDDENKLFKVVCMNGSITSFLRKSMWRKNEEQVYRFNFWKKDRDQFFHHAVDASIIAIFSLLTKTLYNKLRVYESYDVQRREDGVYLINKETGEVKKADKDYWKDQHNFLKIRENAIEIKNVLNNVDFQNQVRYSRKANTKLNTQLFNETLYGVKEFENNFYKLEKVNLFSRKDLRKFILEDLNEESEKNKKNENGSRKRILTEKYIVDEILQILENEEFKDSKSDINALNKYMDSLPSKFSEFFSQDFINKCKKENSLILTFDAIKHNDPKKVIKIKNLKFFREDATLKNKQAVHKDSKNQIKSFYESYKCVGFIWLKNKNDLEESIFVPINSRVIHFGDKDKDIFDFDSYNKEKLLNEINLKRPENKKFNSINEIEFVKFVKPGALLLNFENQQIYYISTLESSSLRAKIKLLNKMDKGKAVSMKKITNPDEYKIIEHVNPLGINLNWTKKLENNN

SEQ ID NO: 70 - protein, 1473 aa, Flavobacterium branchiophilum
MAKILGLDLGTNSIGWAVVERENIDFSLIDKGVRIFSEGVKSEKGIESSRAAERTGYRSARKIKYRRKLRKYETLKVLSLNRMCPLSIEEVEEWKKSGFKDYPLNPEFLKWLSTDEESNVNPYFFRDRASKHKVSLFELGRAFYHIAQRRGFLSNRLDQSAEGILEEHCPKIEAIVEDLISIDEISTNITDYFFETGILDSNEKNGYAKDLDEGDKKLVSLYKSLLAILKKNESDFENCKSEIIERLNKKDVLGKVKGKIKDISQAMLDGNYKTLGQYFYSLYSKEKIRNQYTSREEHYLSEFITICKVQGIDQINEEEKINEKKFDGLAKDLYKAIFFQRPLKSQKGLIGKCSFEKSKSRCAISHPDFEEYRMWTYLNTIKIGTQSDKKLRFLTQDEKLKLVPKFYRKNDFNFDVLAKELIEKGSSFGFYKSSKKNDFFYWFNYKPTDTVAACQVAASLKNAIGEDWKTKSFKYQTINSNKEQVSRTVDYKDLWHLLTVATSDVYLYEFAIDKLGLDEKNAKAFSKTKLKKDFASLSLSAINKILPYLKEGLLYSHAVFVANIENIVDENIWKDEKQRDYIKTQISEIIENYTLEKSRFEIINGLLKEYKSENEDGKRVYYSKEAEQSFENDLKKKLVLFYKSNEIENKEQQETIFNELLPIFIQQLKDYEFIKIQRLDQKVLIFLKGKNETGQIFCTEEKGTAEEKEKKIKNRLKKLYHPSDIEKFKKKIIKDEFGNEKIVLGSPLTPSIKNPMAMRALHQLRKVLNALILEGQIDEKTIIHIEMARELNDANKRKGIQDYQNDNKKFREDAIKEIKKLYFEDCKKEVEPTEDDILRYQLWMEQNRSEIYEEGKNISICDIIGSNPAYDIEHTIPRSRSQDNSQMNKTLCSQRFNREVKKQSMPIELNNHLEILPRIAHWKEEADNLTREIEIISRSIKAAATKEIKDKKIRRRHYLTLKRDYLQGKYDRFIWEEPKVGFKNSQIPDTGIITKYAQAYLKSYFKKVESVKGGMVAEFRKIWGIQESFIDENGMKHYKVKDRSKHTHHTIDAITIACMTKEKYDVLAHAWTLEDQQNKKEARSIIEASKPWKTFKEDLLKIEEEILVSHYTPDNVKKQAKKIVRVRGKKQFVAEVERDVNGKAVPKKAASGKTIYKLDGEGKKLPRLQQGDTIRGSLHQDSIYGAIKNPLNTDEIKYVIRKDLESIKGSDVESIVDEVVKEKIKEAIANKVLLLSSNAQQKNKLVGTVWMNEEKRIAINKVRIYANSVKNPLHIKEHSLLSKSKHVHKQKVYGQNDENYAMAIYELDGKRDFELINIFNLAKLIKQGQGFYPLHKKKEIKGKIVFVPIEKRNKRDVVLKRGQQVVFYDKEVENPKDISEIVDFKGRIYIIEGLSIQRIVRPSGKVDEYGVIMLRYFKEARKADDIKQDNFKPDGVFKLGENKPTRKMNHNQFTAFVEGIDFKVLPSGKFEKI

SEQ ID NO: 71 - protein, 1391 aa, Eubacterium yurii
MENKQYYIGLDVGTNSVGWAVTDTSYNLLRAKGKDMWGARLFEKANTAAERRTKRTSRRRSEREKARKAMLKELFADEINRVDPSFFIRLEESKFFLDDRSENNRQRYTLFNDATFTDKDYYEKYKTIFHLRSALINSDEKFDVRLVFLAILNLFSHRGHFLNASLKGDGDIQGMDVFYNDLVESCEYFEIELPRITNIDNFEKILSQKGKSRTKILEELSEELSISKKDKSKYNLIKLISGLEASVVELYNIEDIQDENKKIKIGFRESDYEESSLKVKEIIGDEYFDLVERAKSVHDMGLLSNIIGNSKYLCEARVEAYENHHKDLLKIKELLKKYDKKAYNDMFRKMTDKNYSAYVGSVNSNIAKERRSVDKRKIEDLYKYIEDTALKNIPDDNKDKIEILEKIKLGEFLKKQLTASNGVIPNQLQSRELRAILKKAENYLPFLKEKGEKNLTVSEMIIQLFEFQIPYYVGPLDKNPKKDNKANSWAKIKQGGRILPWNFEDKVDVKGSRKEFIEKMVRKCTYISDEHTLPKQSLLYEKFMVLNEINNIKIDGEKISVEAKQKIYNDLFVKGKKVSQKDIKKELISLNIMDKDSVLSGTDTVCNAYLSSIGKFTGVFKEEINKQSIVDMIEDIIFLKTVYGDEKRFVKEEIVEKYGDEIDKDKIKRILGFKFSNWGNLSKSFLELEGADVGTGEVRSIIQSLWETNFNLMELLSSRFTYMDELEKRVKKLEKPLSEWTIEDLDDMYLSSPVKRMIWQSMKIVDEIQTVIGYAPKRIFVEMTRSEGEKVRTKSRKDRLKELYNGIKEDSKQWVKELDSKDESYFRSKKMYLYYLQKGRCMYSGEVIELDKLMDDNLYDIDHIYPRSFVKDDSLDNLVLVKKEINNRKQNDPITPQIQASCQGFWKILHDQGFMSNEKYSRLTRKTQEFSDEEKLSFINRQIVETGQATKCMAQILQKSMGEDVDVVFSKARLVSEFRHKFELFKSRLINDFHHANDAYLNIVVGNSYFVKFTRNPANFIKDARKNPDNPVYKYHMDRFFERDVKSKSEVAWIGQSEGNSGTIVIVKKTMAKNSPLITKKVEEGHGSITKETIVGVKEIKFGRNKVEKADKTPKKPNLQAYRPIKTSDERLCNILRYGGRTSISISGYCLVEYVKKRKTIRSLEAIPVYLGRKDSLSEEKLLNYFRYNLNDGGKDSVSDIRLCLPFISTNSLVKIDGYLYYLGGKNDDRIQLYNAYQLKMKKEEVEYIRKIEKAVSMSKFDEIDREKNPVLTEEKNIELYNKIQDKFENTVFSKRMSLVKYNKKDLSFGDFLKNKKSKFEEIDLEKQCKVLYNIIFNLSNLKEVDLSDIGGSKSTGKCRCKKNITNYKEFKLIQQSITGLYSCEKDLMTI

SEQ ID NO: 72 - protein, 1131 aa, Acidovorax sp.
  source 1..1131: note = Acidovorax ebreus
MAQHVFGLDIGIASVGWAILGEQRIIDLGVRCFDKAETAKEGDPLNLTRRQARLLRRRLYRRAWRLTQLSRLLKRKGLIADAKLFAKAPSYGDSAWELRRQGLDRLLTPLEWARVIYHQCKHRGFHWTSKAEEAKADSDAEGGRVKQGLAHTKALMQAKNYRSAAEMVLAEFPDAQRNKRGQYDKALSRVLLGEELALLFATQRRLGNPHASDFFEKLILGDGDRKSGLFWQQKPALSGADLLKMLGKCTFEKGEYRAPKASFSVERHVWLTRLNNLRIVVDGRSRPLNEAERQAALLLPYQTETSKYKTLKNAFIKAGLWGDGVRFGGLAYPSQAQIDAEKTKDPEDQFLVKLPAWHELRKAFKAAGHEALWQQISTPALDGDPTLLDQIATVLSVYKDGAEVVQQLRQLALPEPAASIAVLEKISFDKFSSLSLKALRRIVPLMQSGLRYDEAVAQIPEYGHHSQRIEPGAAKHLYLPPFYEAQRKYAGKGDHIGSMQFRDDADIPRNPVVLRALNQARKVVNALIREYGSPIAVNIEMARDLSRPLDERNKVKRAQEEFRDRNDRARSEFERDFGYKPKAAAFEKWMLYREQLGQCAYSQQPLDIQRVLDDHNYAQVDHALPYSRSYDDSKNNKVLVLTHENQNKGNRTAFEYLTSFPDGEDGERWRTFVAWVQGNKAYRMAKRNRLLRKNYGVDESKGFIDRNLNDTRYICKFFKNYVEEHLQLAARADGDTARRCVVVNGQLTAFLRARWGLTKVRGDSDRHHALDAAVVAACTHGMVKALADYSRRKEISFLQEGFPDPETGEILNPAAFDRARQHFPEPWTHFAHELKARLFTDDLAALREDMQRLGSYTTEDLGRLRTLFVSRAPQRRSGGAVHKETIYAQPESLKQQGGVIEKILLTSLKLQDFDKLLNPESNDHFVEPHRNERLYAAIRQRLEQFGGRADKAFGPDNLFHKPDKNNQPTGPVVRSIKLVRGKQTGIPIRGGLAKNDSMLRVDIFTKAGKFHLVPVYVHHRVTGLPNRAIVAFKDEDEWTLIDESFAFLFSVYPNDYVKVTLKKEQQSGYYSGADRSTGAMNLWAHDRAASVGKDGLIRGIGVKTALSVEKFNVDVLGRIYLAPPETRSGLA

SEQ ID NO: 73 - protein, 1197 aa, Porphyromonas sp.
MLMSKHVLGLDLGVGSIGWCLIALDAQGDPAEILGMGSRVVPLNNATKAIEAFNAGAAFTASQERTARRTMRRGFARYQLRRYRLRRELEKVGMLPDAALIQLPLLELWELRERAATAGRRLTLPELGRVLCHINQKRGYRHVKSDAAAIVGDEGEKKKDSNSAYLAGIRANDEKLQAEHKTVGQYFAEQLRQNQSESPTGGISYRIKDQIFSRQCYIDEYDQIMAVQRVHYPDILTDEFIRMLRDEVIFMQRPLKSCKHLVSLCEFEKQERVMRVQQDDGKGGWQLVERRVKFGPKVAPKSSPLFQLCCIYEAVNNIRLTRPNGSPCDITPEERAKIVAHLQSSASLSFAALKKLLKEKALIADQLTSKSGLKGNSTRVALASALQPYPQYHHLLDMELETRMMTVQLTDEETGEVTEREVAVVTDSYVRKPLYRLWHILYSIEEREAMRRALITQLGMKEEDLDGGLLDQLYRLDFVKPGYGNKSAKFICKLLPQLQQGLGYSEACAAVGYRHSNSPTSEEITERTLLEKIPLLQRNELRQPLVEKILNQMINLVNALKAEYGIDEVRVELARELKMSREERERMARNNKDREERNKGVAAKIRECGLYPTKPRIQKYMLWKEAGRQCLYCGRSIEEEQCLREGGMEVEHIIPKSVLYDDSYGNKTCACRRCNKEKGNRTALEYIRAKGREAEYMKRINDLLKEKKISYSKHQRLRWLKEDIPSDFLERQLRLTQYISRQAMAILQQGIRRVSASEGGVTARLRSLWGYGKILHTLNLDRYDSMGETERVSREGEATEELHITNWSKRMDHRHHAIDALVVACTRQSYIQRLNRLSSEFGREDKKKEDQEAQEQQATETGRLSNLERWLTQRPHFSVRTVSDKVAEILISYRPGQRVVTRGRNIYRKKMADGREVSCVQRGVLVPRGELMEASFYGKILSQGRVRIVKRYPLHDLKGEVVDPHLRELITTYNQELKSREKGAPIPPLCLDKDKKQEVRSVRCYAKTLSLDKAIPMCFDEKGEPTAFVKSASNHHLALYRTPKGKLVESIVTFWDAVDRARYGIPLVITHPREVMEQVLQRGDIPEQVLSLLPPSDWVFVDSLQQDEMVVIGLSDEELQRALEAQNYRKISEHLYRVQKMSSSYYVFRYHLETSVADDKNTSGRIPKFHRVQSLKAYEERNIRKVRVDLLGRISLL

SEQ ID NO: 74 - protein, 1265 aa, Mycoplasma ovipneumoniae
MHNKKNITIGFDLGIASIGWAIIDSTTSKILDWGTRTFEERKTANERRAFRSTRRNIRRKAYRNQRFINLILKYKDLFELKNISDIQRANKKDTENYEKIISFFTEIYKKCAAKHSNILEVKVKALDSKIEKLDLIWILHDYLENRGFFYDLEEENVADKYEGIEHPSILLYDFFKKNGFFKSNSSIPKDLGGYSFSNLQWVNEIKKLFEVQEINPEFSEKFLNLFTSVRDYAKGPGSEHSASEYGIFQKDEKGKVFKKYDNIWDKTIGKCSFFVEENRSPVNYPSYEIFNLLNQLINLSTDLKTTNKKIWQLSSNDRNELLDELLKVKEKAKIISISLKKNEIKKIILKDFGFEKSDIDDQDTIEGRKIIKEEPTTKLEVTKHLLATIYSHSSDSNWININNILEFLPYLDAICIILDREKSRGQDEVLKKLTEKNIFEVLKIDREKQLDFVKSIFSNTKFNFKKIGNFSLKAIREFLPKMFEQNKNSEYLKWKDEEIRRKWEEQKSKLGKTDKKTKYLNPRIFQDEIISPGTKNTFEQAVLVLNQIIKKYSKENIIDAIIIESPREKNDKKTIEEIKKRNKKGKGKTLEKLFQILNLENKGYKLSDLETKPAKLLDRLRFYHQQDGIDLYTLDKINIDQLINGSQKYEIEHIIPYSMSYDNSQANKILTEKAENLKKGKLIASEYIKRNGDEFYNKYYEKAKELFINKYKKNKKLDSYVDLDEDSAKNRFRFLTLQDYDEFQVEFLARNLNDTRYSTKLFYHALVEHFENNEFFTYIDENSSKHKVKISTIKGHVTKYFRAKPVQKNNGPNENLNNNKPEKIEKNRENNEHHAVDAAIVAIIGNKNPQIANLLTLADNKTDKKFLLHDENYKENIETGELVKIPKFEVDKLAKVEDLKKIIQEKYEEAKKHTAIKFSRKTRTILNGGLSDETLYGFKYDEKEDKYFKIIKKKLVTSKNEELKKYFENPFGKKADGKSEYTVLMAQSHLSEFNKLKEIFEKYNGFSNKTGNAFVEYMNDLALKEPTLKAEIESAKSVEKLLYYNFKPSDQFTYHDNINNKSFKRFYKNIRIIEYKSIPIKFKILSKHDGGKSFKDTLFSLYSLVYKVYENGKESYKSIPVTSQMRNFGIDEFDFLDENLYNKEKLDIYKSDFAKPIPVNCKPVFVLKKGSILKKKSLDIDDFKETKETEEGNYYFISTISKRFNRDTAYGLKPLKLSVVKPVAEPSTNPIFKEYIPIHLDELGNEYPVKIKEHTDDEKLMCTIK

SEQ ID NO: 75 - protein, 1409 aa, Wolinella succinogenes
MLVSPISVDLGGKNTGFFSFTDSLDNSQSGTVIYDESFVLSQVGRRSKRHSKRNNLRNKLVKRLFLLILQEHHGLSIDVLPDEIRGLFNKRGYTYAGFELDEKKKDALESDTLKEFLSEKLQSIDRDSDVEDFLNQIASNAESFKDYKKGFEAVFASATHSPNKKLELKDELKSEYGENAKELLAGLRVTKEILDEFDKQENQGNLPRAKYFEELGEYIATNEKVKSFFDSNSLKLTDMTKLIGNISNYQLKELRRYFNDKEMEKGDIWIPNKLHKITERFVRSWHPKNDADRQRRAELMKDLKSKEIMELLTTTEPVMTIPPYDDMNNRGAVKCQTLRLNEEYLDKHLPNWRDIAKRLNHGKFNDDLADSTVKGYSEDSTLLHRLLDTSKEIDIYELRGKKPNELLVKTLGQSDANRLYGFAQNYYELIRQKVRAGIWVPVKNKDDSLNLEDNSNMLKRCNHNPPHKKNQIHNLVAGILGVKLDEAKFAEFEKELWSAKVGNKKLSAYCKNIEELRKTHGNTFKIDIEELRKKDPAELSKEEKAKLRLTDDVILNEWSQKIANFFDIDDKHRQRFNNLFSMAQLHTVIDTPRSGFSSTCKRCTAENRFRSETAFYNDETGEFHKKATATCQRLPADTQRPFSGKIERYIDKLGYELAKIKAKELEGMEAKEIKVPIILEQNAFEYEESLRKSKTGSNDRVINSKKDRDGKKLAKAKENAEDRLKDKDKRIKAFSSGICPYCGDTIGDDGEIDHILPRSHTLKIYGTVFNPEGNLIYVHQKCNQAKADSIYKLSDIKAGVSAQWIEEQVANIKGYKTFSVLSAEQQKAFRYALFLQNDNEAYKKVVDWLRTDQSARVNGTQKYLAKKIQEKLTKMLPNKHLSFEFILADATEVSELRRQYARQNPLLAKAEKQAPSSHAIDAVMAFVARYQKVFKDGTPPNADEVAKLAMLDSWNPASNEPLTKGLSTNQKIEKMIKSGDYGQKNMREVFGKSIFGENAIGERYKPIVVQEGGYYIGYPATVKKGYELKNCKVVTSKNDIAKLEKIIKNQDLISLKENQYIKIFSINKQTISELSNRYFNMNYKNLVERDKEIVGLLEFIVENCRYYTKKVDVKFAPKYIHETKYPFYDDWRRFDEAWRYLQENQNKTSSKDRFVIDKSSLNEYYQPDKNEYKLDVDTQPIWDDFCRWYFLDRYKTANDKKSIRIKARKTFSLLAESGVQGKVFRAKRKIPTGYAYQALPMDNNVIAGDYANILLEANSKTLSLVPKSGISIEKQLDKKLDVIKKTDVRGLAIDNNSFFNADFDTHGIRLIVENTSVKVGNFPISAIDKSAKRMIFRALFEKEKGKRKKKTTISFKESGPVQDYLKVFLKKIVKIQLRTDGSISNIVVRKNAADFTLSFRSEHIQKLLK

SEQ ID NO: 76 - protein, 1345 aa, Streptococcus mutans
MKKPYSIGLDIGTNSVGWAVVTDDYKVPAKKMKVLGNTDKSHIEKNLLGALLFDSGNTAEDRRLKRTARRRYTRRRNRILYLQEIFSEEMGKVDDSFFHRLEDSFLVTEDKRGERHPIFGNLEEEVKYHENFPTIYHLRQYLADNPEKVDLRLVYLALAHIIKFRGHFLIEGKFDTRNNDVQRLFQEFLAVYDNTFENSSLQEQNVQVEEILTDKISKSAKKDRVLKLFPNEKSNGRFAEFLKLIVGNQADFKKHFELEEKAPLQFSKDTYEEELEVLLAQIGDNYAELFLSAKKLYDSILLSGILTVTDVGTKAPLSASMIQRYNEHQMDLAQLKQFIRQKLSDKYNEVFSDVSKDGYAGYIDGKTNQEAFYKYLKGLLNKIEGSGYFLDKIEREDFLRKQRTFDNGSIPHQIHLQEMRAIIRRQAEFYPFLADNQDRIEKLLTFRIPYYVGPLARGKSDFAWLSRKSADKITPWNFDEIVDKESSAEAFINRMTNYDLYLPNQKVLPKHSLLYEKFTVYNELTKVKYKTEQGKTAFFDANMKQEIFDGVFKVYRKVTKDKLMDFLEKEFDEFRIVDLTGLDKENKVFNASYGTYHDLCKILDKDFLDNSKNEKILEDIVLTLTLFEDREMIRKRLENYSDLLTKEQVKKLERRHYTGWGRLSAELIHGIRNKESRKTILDYLIDDGNSNRNFMQLINDDALSFKEEIAKAQVIGETDNLNQVVSDIAGSPAIKKGILQSLKIVDELVKIMGHQPENIVVEMARENQFTNQGRRNSQQRLKGLTDSIKEFGSQILKEHPVENSQLQNDRLFLYYLQNGRDMYTGEELDIDYLSQYDIDHIIPQAFIKDNSIDNRVLTSSKENRGKSDDVPSKDVVRKMKSYWSKLLSAKLITQRKFDNLTKAERGGLTDDDKAGFIKRQLVETRQITKHVARILDERFNTETDENNKKIRQVKIVTLKSNLVSNFRKEFELYKVREINDYHHAHDAYLNAVIGKALLGVYPQLEPEFVYGDYPHFHGHKENKATAKKFFYSNIMNFFKKDDVRTDKNGEIIWKKDEHISNIKKVLSYPQVNIVKKVEEQTGGFSKESILPKGNSDKLIPRKTKKFYWDTKKYGGFDSPIVAYSILVIADIEKGKSKKLKTVKALVGVTIMEKMTFERDPVAFLERKGYRNVQEENIIKLPKYSLFKLENGRKRLLASARELQKGNEIVLPNHLGTLLYHAKNIHKVDEPKHLDYVDKHKDEFKELLDVVSNFSKKYTLAEGNLEKIKELYAQNNGEDLKELASSFINLLTFTAIGAPATFKFFDKNIDRKRYTSTTEILNATLIHQSITGLYETRIDLNKLGGD

SEQ ID NO: 77 - protein, 1218 aa, Prevotella timonensis
MNKRILGLDTGTNSLGWAVVDWDEHAQSYELIKYGDVIFQEGVKIEKGIESSKAAERSGYKAIRKQYFRRRLRKIQVLKVLVKYHLCPYLSDDDLRQWHLQKQYPKSDELMLWQRTSDEEGKNPYYDRHRCLHEKLDLTVEADRYTLGRALYHLTQRRGFLSNRLDTSADNKEDGVVKSGISQLSTEMEEAGCEYLGDYFYKLYDAQGNKVRIRQRYTDRNKHYQHEFDAICEKQELSSELIEDLQRAIFFQLPLKSQRHGVGRCTFERGKPRCADSHPDYEEFRMLCFVNNIQVKGPHDLELRPLTYEEREKIEPLFFRKSKPNFDFEDIAKALAGKKNYAWIHDKEERAYKFNYRMTQGVPGCPTIAQLKSIFGDDWKTGIAETYTLIQKKNGSKSLQEMVDDVWNVLYSFSSVEKLKEFAHHKLQLDEESAEKFAKIKLSHSFAALSLKAIRKFLPFLRKGMYYTHASFFANIPTIVGKEIWNKEQNRKYIMENVGELVFNYQPKHREVQGTIEMLIKDFLANNFELPAGATDKLYHPSMIETYPNAQRNEFGILQLGSPRTNAIRNPMAMRSLHILRRVVNQLLKESIIDENTEVHVEYARELNDANKRRAIADRQKEQDKQHKKYGDEIRKLYKEETGKDIEPTQTDVLKFQLWEEQNHHCLYTGEQIGITDFIGSNPKFDIEHTIPQSVGGDSTQMNLTLCDNRFNREVKKAKLPTELANHEEILTRIEPWKNKYEQLVKERDKQRTFAGMDKAVKDIRIQKRHKLQMEIDYWRGKYERFTMTEVPEGFSRRQGTGIGLISRYAGLYLKSLFHQADSRNKSNVYVVKGVATAEFRKMWGLQSEYEKKCRDNHSHHCMDAITIACIGKREYDLMAEYYRMEETFKQGRGSKPKFSKPWATFTEDVLNIYKNLLVVHDTPNNMPKHTKKYVQTSIGKVLAQGDTARGSLHLDTYYGAIERDGEIRYVVRRPLSSFTKPEELENIVDETVKRTIKEAIADKNFKQAIAEPIYMNEEKGILIKKVRCFAKSVKQPINIRQHRDLSKKEYKQQYHVMNENNYLLAIYEGLVKNKVVREFEIVSYIEAAKYYKRSQDRNIFSSIVPTHSTKYGLPLKTKLLMGQLVLMFEENPDEIQVDNTKDLVKRLYKVVGIEKDGRIKFKYHQEARKEGLPIFSTPYKNNDDYAPIFRQSINNINILVDGIDFTIDILGKVTLKE

SEQ ID NO: 78 - protein, 1021 aa, Clostridium cellulolyticum
MKYTLGLDVGIASVGWAVIDKDNNKIIDLGVRCFDKAEESKTGESLATARRIARGMRRRISRRSQRLRLVKKLFVQYEIIKDSSEFNRIFDTSRDGWKDPWELRYNALSRILKPYELVQVLTHITKRRGFKSNRKEDLSTTKEGVVITSIKNNSEMLRTKNYRTIGEMIFMETPENSNKRNKVDEYIHTIAREDLLNEIKYIFSIQRKLGSPFVTEKLEHDFLNIWEFQRPFASGDSILSKVGKCTLLKEELRAPTSCYTSEYFGLLQSINNLVLVEDNNTLTLNNDQRAKIIEYAHFKNEIKYSEIRKLLDIEPEILFKAHNLTHKNPSGNNESKKFYEMKSYHKLKSTLPTDIWGKLHSNKESLDNLFYCLTVYKNDNEIKDYLQANNLDYLIEYIAKLPTFNKFKHLSLVAMKRIIPFMEKGYKYSDACNMAELDFTGSSKLEKCNKLTVEPIIENVTNPVVIRALTQARKVINAIIQKYGLPYMVNIELAREAGMTRQDRDNLKKEHENNRKAREKISDLIRQNGRVASGLDILKWRLWEDQGGRCAYSGKPIPVCDLLNDSLTQIDHIYPYSRSMDDSYMNKVLVLTDENQNKRSYTPYEVWGSTEKWEDFEARIYSMHLPQSKEKRLLNRNFITKDLDSFISRNLNDTRYISRFLKNYIESYLQFSNDSPKSCVVCVNGQCTAQLRSRWGLNKNREESDLHHALDAAVIACADRKIIKEITNYYNERENHNYKVKYPLPWHSFRQDLMETLAGVFISRAPRRKITGPAHDETIRSPKHFNKGLTSVKIPLTTVTLEKLETMVKNTKGGISDKAVYNVLKNRLIEHNNKPLKAFAEKIYKPLKNGTNGAIIRSIRVETPSYTGVFRNEGKGISDNSLMVRVDVFKKKDKYYLVPIYVAHMIKKELPSKAIVPLKPESQWELIDSTHEFLFSLYQNDYLVIKTKKGITEGYYRSCHRGTGSLSLMPHFANNKNVKIDIGVRTAISIEKYNVDILGNKSIVKGEPRRGMEKYNSFKSN

SEQ ID NO: 79 - protein, 1629 aa, Francisella tularensis
MNFKILPIAIDLGVKNTGVFSAFYQKGTSLERLDNKNGKVYELSKDSYTLLMNNRTARRHQRRGIDRKQLVKRLFKLIWTEQLNLEWDKDTQQAISFLFNRRGFSFITDGYSPEYLNIVPEQVKAILMDIFDDYNGEDDLDSYLKLATEQESKISEIYNKLMQKILEFKLMKLCTDIKDDKVSTKTLKEITSYEFELLADYLANYSESLKTQKFSYTDKQGNLKELSYYHHDKYNIQEFLKRHATINDRILDTLLTDDLDIWNFNFEKFDFDKNEEKLQNQEDKDHIQAHLHHFVFAVNKIKSEMASGGRHRSQYFQEITNVLDENNHQEGYLKNFCENLHNKKYSNLSVKNLVNLIGNLSNLELKPLRKYFNDKIHAKADHWDEQKFTETYCHWILGEWRVGVKDQDKKDGAKYSYKDLCNELKQKVTKAGLVDFLLELDPCRTIPPYLDNNNRKPPKCQSLILNPKFLDNQYPNWQQYLQELKKLQSIQNYLDSFETDLKVLKSSKDQPYFVEYKSSNQQIASGQRDYKDLDARILQFIFDRVKASDELLLNEIYFQAKKLKQKASSELEKLESSKKLDEVIANSQLSQILKSQHTNGIFEQGTFLHLVCKYYKQRQRARDSRLYIMPEYRYDKKLHKYNNTGRFDDDNQLLTYCNHKPRQKRYQLLNDLAGVLQVSPNFLKDKIGSDDDLFISKWLVEHIRGFKKACEDSLKIQKDNRGLLNHKINIARNTKGKCEKEIFNLICKIEGSEDKKGNYKHGLAYELGVLLFGEPNEASKPEFDRKIKKFNSIYSFAQIQQIAFAERKGNANTCAVCSADNAHRMQQIKITEPVEDNKDKIILSAKAQRLPAIPTRIVDGAVKKMATILAKNIVDDNWQNIKQVLSAKHQLHIPIITESNAFEFEPALADVKGKSLKDRRKKALERISPENIFKDKNNRIKEFAKGISAYSGANLTDGDFDGAKEELDHIIPRSHKKYGTLNDEANLICVTRGDNKNKGNRIFCLRDLADNYKLKQFETTDDLEIEKKIADTIWDANKKDFKFGNYRSFINLTPQEQKAFRHALFLADENPIKQAVIRAINNRNRTFVNGTQRYFAEVLANNIYLRAKKENLNTDKISFDYFGIPTIGNGRGIAEIRQLYEKVDSDIQAYAKGDKPQASYSHLIDAMLAFCIAADEHRNDGSIGLEIDKNYSLYPLDKNTGEVFTKDIFSQIKITDNEFSDKKLVRKKAIEGFNTHRQMTRDGIYAENYLPILIHKELNEVRKGYTWKNSEEIKIFKGKKYDIQQLNNLVYCLKFVDKPISIDIQISTLEELRNILTTNNIAATAEYYYINLKTQKLHEYYIENYNTALGYKKYSKEMEFLRSLAYRSERVKIKSIDDVKQVLDKDSNFIIGKITLPFKKEWQRLYREWQNTTIKDDYEFLKSFFNVKSITKLHKKVRKDFSLPISTNEGKFLVKRKTWDNNFIYQILNDSDSRADGTKPFIPAFDISKNEIVEAIIDSFTSKNIFWLPKNIELQKVDNKNIFAIDTSKWFEVETPSDLRDIGIATIQYKIDNNSRPKVRVKLDYVIDDDSKINYFMNHSLLKSRYPDKVLEILKQSTIIEFESSGFNKTIKEMLGMKLAGIYNETSNN

SEQ ID NO: 80 - protein, 1168 aa, Azospirillum sp.
MARPAFRAPRREHVNGWTPDPHRISKPFFILVSWHLLSRVVIDSSSGCFPGTSRDHTDKFAEWECAVQPYRLSFDLGTNSIGWGLLNLDRQGKPREIRALGSRIFSDGRDPQDKASLAVARRLARQMRRRRDRYLTRRTRLMGALVRFGLMPADPAARKRLEVAVDPYLARERATRERLEPFEIGRALFHLNQRRGYKPVRTATKPDEEAGKVKEAVERLEAAIAAAGAPTLGAWFAWRKTRGETLRARLAGKGKEAAYPFYPARRMLEAEFDTLWAEQARHHPDLLTAEAREILRHRIFHQRPLKPPPVGRCTLYPDDGRAPRALPSAQRLRLFQELASLRVIHLDLSERPLTPAERDRIVAFVQGRPPKAGRKPGKVQKSVPFEKLRGLLELPPGTGFSLESDKRPELLGDETGARIAPAFGPGWTALPLEEQDALVELLLTEAEPERAIAALTARWALDEATAAKLAGATLPDFHGRYGRRAVAELLPVLERETRGDPDGRVRPIRLDEAVKLLRGGKDHSDFSREGALLDALPYYGAVLERHVAFGTGNPADPEEKRVGRVANPTVHIALNQLRHLVNAILARHGRPEEIVIELARDLKRSAEDRRREDKRQADNQKRNEERKRLILSLGERPTPRNLLKLRLWEEQGPVENRRCPYSGETISMRMLLSEQVDIDHILPFSVSLDDSAANKVVCLREANRIKRNRSPWEAFGHDSERWAGILARAEALPKNKRWRFAPDALEKLEGEGGLRARHLNDTRHLSRLAVEYLRCVCPKVRVSPGRLTALLRRRWGIDAILAEADGPPPEVPAETLDPSPAEKNRADHRHHALDAVVIGCIDRSMVQRVQLAAASAEREAAAREDNIRRVLEGFKEEPWDGFRAELERRARTIVVSHRPEHGIGGALHKETAYGPVDPPEEGFNLVVRKPIDGLSKDEINSVRDPRLRRALIDRLAIRRRDANDPATALAKAAEDLAAQPASRGIRRVRVLKKESNPIRVEHGGNPSGPRSGGPFHKLLLAGEVHHVDVALRADGRRWVGHWVTLFEAHGGRGADGAAAPPRLGDGERFLMRLHKGDCLKLEHKGRVRVMQVVKLEPSSNSVVVVEPHQVKTDRSKHVKISCDQLRARGARRVTVDPLGRVRVHAPGARVGIGGDAGRTAMEPAEDIS

SEQ ID NO: 81 - protein, 1364 aa, Peptoniphilus sp.
  source 1..1364: note = Peptoniphilus duerdenii
MKNLKEYYIGLDIGTASVGWAVTDESYNIPKFNGKKMWGVRLFDDAKTAEERRTQRGSRRRLNRRKERINLLQDLFATEISKVDPNFFLRLDNSDLYREDKDEKLKSKYTLFNDKDFKDRDYHKKYPTIHHLIMDLIEDEGKKDIRLLYLACHYLLKNRGHFIFEGQKFDTKNSFDKSINDLKIHLRDEYNIDLEFNNEDLIEIITDTTLNKTNKKKELKNIVGDTKFLKAISAIMIGSSQKLVDLFEDGEFEETTVKSVDFSTTAFDDKYSEYEEALGDTISLLNILKSIYDSSILENLLKDADKSKDGNKYISKAFVKKFNKHGKDLKTLKRIIKKYLPSEYANIFRNKSINDNYVAYTKSNITSNKRTKASKFTKQEDFYKFIKKHLDTIKETKLNSSENEDLKLIDEMLTDIEFKTFIPKLKSSDNGVIPYQLKLMELKKILDNQSKYYDFLNESDEYGTVKDKVESIMEFRIPYYVGPLNPDSKYAWIKRENTKITPWNFKDIVDLDSSREEFIDRLIGRCTYLKEEKVLPKASLIYNEFMVLNELNNLKLNEFLITEEMKKAIFEELFKTKKKVTLKAVSNLLKKEFNLTGDILLSGTDGDFKQGLNSYIDFKNIIGDKVDRDDYRIKIEEIIKLIVLYEDDKTYLKKKIKSAYKNDFTDDEIKKIAALNYKDWGRLSKRFLTGIEGVDKTTGEKGSIIYFMREYNLNLMELMSGHYTFTEEVEKLNPVENRELCYEMVDELYLSPSVKRMLWQSLRVVDEIKRIIGKDPKKIFIEMARAKEAKNSRKESRKNKLLEFYKFGKKAFINEIGEERYNYLLNEINSEEESKFRWDNLYLYYTQLGRCMYSLEPIDLADLKSNNIYDQDHIYPKSKIYDDSLENRVLVKKNLNHEKGNQYPIPEKVLNKNAYGFWKILFDKGLIGQKKYTRLTRRTPFEERELAEFIERQIVETRQATKETANLLKNICQDSEIVYSKAENASRFRQEFDIIKCRTVNDLHHMHDAYLNIVVGNVYNTKFTKNPLNFIKDKDNVRSYNLENMFKYDVVRGSYTAWIADDSEGNVKAATIKKVKRELEGKNYRFTRMSYIGTGGLYDQNLMRKGKGQIPQKENTNKSNIEKYGGYNKASSAYFALIESDGKAGRERTLETIPIMVYNQEKYGNTEAVDKYLKDNLELQDPKILKDKIKINSLIKLDGFLYNIKGKTGDSLSIAGSVQLIVNKEEQKLIKKMDKFLVKKKDNKDIKVTSFDNIKEEELIKLYKTLSDKLNNGIYSNKRNNQAKNISEALDKFKEISIEEKIDVLNQIILLFQSYNNGCNLKSIGLSAKTGVVFIPKKLNYKECKLINQSITGLFENEVDLLNL

SEQ ID NO: 82 - protein, 1119 aa, Lactobacillus coryniformis
MGYRIGLDVGITSTGYAVLKTDKNGLPYKILTLDSVIYPRAENPQTGASLAEPRRIKRGLRRRTRRTKFRKQRTQQLFIHSGLLSKPEIEQILATPQAKYSVYELRVAGLDRRLTNSELFRVLYFFIGHRGFKSNRKAELNPENEADKKQMGQLLNSIEEIRKAIAEKGYRTVGELYLKDPKYNDHKRNKGYIDGYLSTPNRQMLVDEIKQILDKQRELGNEKLTDEFYATYLLGDENRAGIFQAQRDFDEGPGAGPYAGDQIKKMVGKDIFEPTEDRAAKATYTFQYFNLLQKMTSLNYQNTTGDTWHTLNGLDRQAIIDAVFAKAEKPTKTYKPTDFGELRKLLKLPDDARFNLVNYGSLQTQKEIETVEKKTRFVDFKAYHDLVKVLPEEMWQSRQLLDHIGTALTLYSSDKRRRRYFAEELNLPAELIEKLLPLNFSKFGHLSIKSMQNIIPYLEMGQVYSEATTNTGYDFRKKQISKDTIREEITNPVVRRAVTKTIKIVEQIIRRYGKPDGINIELARELGRNFKERGDIQKRQDKNRQTNDKIAAELTELGIPVNGQNIIRYKLHKEQNGVDPYTGDQIPFERAFSEGYEVDHIIPYSISWDDSYTNKVLTSAKCNREKGNRIPMVYLANNEQRLNALTNIADNIIRNSRKRQKLLKQKLSDEELKDWKQRNINDTRFITRVLYNYFRQAIEFNPELEKKQRVLPLNGEVTSKIRSRWGFLKVREDGDLHHAIDATVIAAITPKFIQQVTKYSQHQEVKNNQALWHDAEIKDAEYAAEAQRMDADLFNKIFNGFPLPWPEFLDELLARISDNPVEMMKSRSWNTYTPIEIAKLKPVFVVRLANHKISGPAHLDTIRSAKLFDEKGIVLSRVSITKLKINKKGQVATGDGIYDPENSNNGDKVVYSAIRQALEAHNGSGELAFPDGYLEYVDHGTKKLVRKVRVAKKVSLPVRLKNKAAADNGSMVRIDVFNTGKKFVFVPIYIKDTVEQVLPNKAIARGKSLWYQITESDQFCFSLYPGDMVHIESKTGIKPKYSNKENNTSVVPIKNFYGYFDGADIATASILVRAHDSSYTARSIGIAGLLKFEKYQVDYFGRYHKVHEKKRQLFVKRDE

SEQ ID NO: 83 - protein, 1688 aa, Ignavibacterium album
MEFKKVLGLDIGTNSIGCALLSLPKSIQDYGKGGRLEWLTSRVIPLDADYMKAFIDGKNGLPQVITPAGKRRQKRGSRRLKHRYKLRRSRLIRVFKTLNWLPEDFPLDNPKRIKETISTEGKFSFRISDYVPISDESYREFYREFGYPENEIEQVIEEINFRRKTKGKNKNPMIKLLPEDWVVYYLRKKALIKPTTKEELIRIIYLFNQRRGFKSSRKDLTETAILDYDEFAKRLAEKEKYSAENYETKFVSITKVKEVVELKTDGRKGKKRFKVILEDSRIEPYEIERKEKPDWEGKEYTFLVTQKLEKGKFKQNKPDLPKEEDWALCTTALDNRMGSKHPGEFFFDELLKAFKEKRGYKIRQYPVNRWRYKKELEFIWTKQCQLNPELNNLNINKEILRKLATVLYPSQSKFFGPKIKEFENSDVLHIISEDIIYYQRDLKSQKSLISECRYEKRKGIDGEIYGLKCIPKSSPLYQEFRIWQDIHNIKVIRKESEVNGKKKINIDETQLYINENIKEKLFELFNSKDSLSEKDILELISLNIINSGIKISKKEEETTHRINLFANRKELKGNETKSRYRKVFKKLGFDGEYILNHPSKLNRLWHSDYSNDYADKEKTEKSILSSLGWKNRNGKWEKSKNYDVFNLPLEVAKAIANLPPLKKEYGSYSALAIRKMLVVMRDGKYWQHPDQIAKDQENTSLMLFDKNLIQLTNNQRKVLNKYLLTLAEVQKRSTLIKQKLNEIEHNPYKLELVSDQDLEKQVLKSFLEKKNESDYLKGLKTYQAGYLIYGKHSEKDVPIVNSPDELGEYIRKKLPNNSLRNPIVEQVIRETIFIVRDVWKSFGIIDEIHIELGRELKNNSEERKKTSESQEKNFQEKERARKLLKELLNSSNFEHYDENGNKIFSSFTVNPNPDSPLDIEKFRIWKNQSGLTDEELNKKLKDEKIPTEIEVKKYILWLTQKCRSPYTGKIIPLSKLFDSNVYEIEHIIPRSKMKNDSTNNLVICELGVNKAKGDRLAANFISESNGKCKFGEVEYTLLKYGDYLQYCKDTFKYQKAKYKNLLATEPPEDFIERQINDTRYIGRKLAELLTPVVKDSKNIIFTIGSITSELKITWGLNGVWKDILRPRFKRLESIINKKLIFQDEDDPNKYHFDLSINPQLDKEGLKRLDHRHHALDATIIAATTREHVRYLNSLNAADNDEEKREYFLSLCNHKIRDFKLPWENFTSEVKSKLLSCVVSYKESKPILSDPFNKYLKWEYKNGKWQKVFAIQIKNDRWKAVRRSMFKEPIGTVWIKKIKEVSLKEAIKIQAIWEEVKNDPVRKKKEKYIYDDYAQKVIAKIVQELGLSSSMRKQDDEKLNKFINEAKVSAGVNKNLNTTNKTIYNLEGRFYEKIKVAEYVLYKAKRMPLNKKEYIEKLSLQKMFNDLPNFILEKSILDNYPEILKELESDNKYIIEPHKKNNPVNRLLLEHILEYHNNPKEAFSTEGLEKLNKKAINKIGKPIKYITRLDGDINEEEIFRGAVFETDKGSNVYFVMYENNQTKDREFLKPNPSISVLKAIEHKNKIDFFAPNRLGFSRIILSPGDLVYVPTNDQYVLIKDNSSNETIINWDDNEFISNRIYQVKKFTGNSCYFLKNDIASLILSYSASNGVGEFGSQNISEYSVDDPPIRIKDVCIKIRVDRLGNVRPL

SEQ ID NO: 84 - protein, 1011 aa, unidentified
  source 1..1011: note = uncultured delta proteobacterium
MSSKAIDSLEQLDLFKPQEYTLGLDLGIKSIGWAILSGERIANAGVYLFETAEELNSTGNKLISKAAERGRKRRIRRMLDRKARRGRHIRYLLEREGLPTDELEEVVVHQSNRTLWDVRAEAVERKLTKQELAAVLFHLVRHRGYFPNTKKLPPDDESDSADEEQGKINRATSRLREELKASDCKTIGQFLAQNRDRQRNREGDYSNLMARKLVFEEALQILAFQRKQGHELSKDFEKTYLDVLMGQRSGRSPKLGNCSLIPSELRAPSSAPSTEWFKFLQNLGNLQISNAYREEWSIDAPRRAQIIDACSQRSTSSYWQIRRDFQIPDEYRFNLVNYERRDPDVDLQEYLQQQERKTLANFRNWKQLEKIIGTGHPIQTLDEAARLITLIKDDEKLSDQLADLLPEASDKAITQLCELDFTTAAKISLEAMYRILPHMNQGMGFFDACQQESLPEIGVPPAGDRVPPFDEMYNPVVNRVLSQSRKLINAVIDEYGMPAKIRVELARDLGKGRELRERIKLDQLDKSKQNDQRAEDFRAEFQQAPRGDQSLRYRLWKEQNCTCPYSGRMIPVNSVLSEDTQIDHILPISQSFDNSLSNKVLCFTEENAQKSNRTPFEYLDAADFQRLEAISGNWPEAKRNKLLHKSFGKVAEEWKSRALNDTRYLTSALADHLRHHLPDSKIQTVNGRITGYLRKQWGLEKDRDKHTHHAVDAIVVACTTPAIVQQVTLYHQDIRRYKKLGEKRPTPWPETFRQDVLDVEEEIFITRQPKKVSGGIQTKDTLRKHRSKPDRQRVALTKVKLADLERLVEKDASNRNLYEHLKQCLEESGDQPTKAFKAPFYMPSGPEAKQRPILSKVTLLREKPEPPKQLTELSGGRRYDSMAQGRLDIYRYKPGGKRKDEYRVVLQRMIDLMRGEENVHVFQKGVPYDQGPEIEQNYTFLFSLYFDDLVEFQRSADSEVIRGYYRTFNIANGQLKISTYLEGRQDFDFFGANRLAHFAKVQVNLLGKVIK

SEQ ID NO: 85 - protein, 1156 aa, Ruminococcus albus
MGNYYLGLDVGIGSIGWAVINIEKKRIEDFNVRIFKSGEIQEKNRNSRASQQCRRSRGLRRLYRRKSHRKLRLKNYLSIIGLTTSEKIDYYYETADNNVIQLRNKGLSEKLTPEEIAACLIHICNNRGYKDFYEVNVEDIEDPDERNEYKEEHDSIVLISNLMNEGGYCTPAEMICNCREFDEPNSVYRKFHNSAASKNHYLITRHMLVKEVDLILENQSKYYGILDDKTIAKIKDIIFAQRDFEIGPGKNERFRRFTGYLDSIGKCQFFKDQERGSRFTVIADIYAFVNVLSQYTYTNNRGESVFDTSFANDLINSALKNGSMDKRELKAIAKSYHIDISDKNSDTSLTKCFKYIKVVKPLFEKYGYDWDKLIENYTDTDNNVLNRIGIVLSQAQTPKRRREKLKALNIGLDDGLINELTKLKLSGTANVSYKYMQGSIEAFCEGDLYGKYQAKFNKEIPDIDENAKPQKLPPFKNEDDCEFFKNPVVFRSINETRKLINAIIDKYGYPAAVNIETADELNKTFEDRAIDTKRNNDNQKENDRIVKEIIECIKCDEVHARHLIEKYKLWEAQEGKCLYSGETITKEDMLRDKDKLFEVDHIVPYSLILDNTINNKALVYAEENQKKGQRTPLMYMNEAQAADYRVRVNTMFKSKKCSKKKYQYLMLPDLNDQELLGGWRSRNLNDTRYICKYLVNYLRKNLRFDRSYESSDEDDLKIRDHYRVFPVKSRFTSMFRRWWLNEKTWGRYDKAELKKLTYLDHAADAIIIANCRPEYVVLAGEKLKLNKMYHQAGKRITPEYEQSKKACIDNLYKLFRMDRRTAEKLLSGHGRLTPIIPNLSEEVDKRLWDKNIYEQFWKDDKDKKSCEELYRENVASLYKGDPKFASSLSMPVISLKPDHKYRGTITGEEAIRVKEIDGKLIKLKRKSISEITAESINSIYTDDKILIDSLKTIFEQADYKDVGDYLKKTNQHFFTTSSGKRVNKVTVIEKVPSRWLRKEIDDNNFSLLNDSSYYCIELYKDSKGDNNLQGIAMSDIVHDRKTKKLYLKPDFNYPDDYYTHVMYIFPGDYLRIKSTSKKSGEQLKFEGYFISVKNVNENSFRFISDNKPCAKDKRVSITKKDIVIKLAVDLMGKVQGENNGKGISCGEPLSLLKEKN

SEQ ID NO: 86 - protein, 1356 aa, Lactobacillus farciminis
MTKKEQPYNIGLDIGTSSVGWAVTNDNYDLLNIKKKNLWGVRLFEEAQTAKETRLNRSTRRRYRRRKNRINWLNEIFSEELAKTDPSFLIRLQNSWVSKKDPDRKRDKYNLFIDGPYTDKEYYREFPTIFHLRKELILNKDKADIRLIYLALHNILKYRGNFTYEHQKFNISNLNNNLSKELIELNQQLIKYDISFPDDCDWNHISDILIGRGNATQKSSNILKDFTLDKETKKLLKEVINLILGNVAHLNTIFKTSLTKDEEKLNFSGKDIESKLDDLDSILDDDQFTVLDAANRIYSTITLNEILNGESYFSMAKVNQYENHAIDLCKLRDMWHTTKNEEAVEQSRQAYDDYINKPKYGTKELYTSLKKFLKVALPTNLAKEAEEKISKGTYLVKPRNSENGVVPYQLNKIEMEKIIDNQSQYYPFLKENKEKLLSILSFRIPYYVGPLQSAEKNPFAWMERKSNGHARPWNFDEIVDREKSSNKFIRRMTVTDSYLVGEPVLPKNSLIYQRYEVLNELNNIRITENLKTNPIGSRLTVETKQRIYNELFKKYKKVTVKKLTKWLIAQGYYKNPILIGLSQKDEFNSTLTTYLDMKKIFGSSFMEDNKNYDQIEELIEWLTIFEDKQILNEKLHSSKYSYTPDQIKKISNMRYKGWGRLSKKILMDITTETNTPQLLQLSNYSILDLMWATNNNFISIMSNDKYDFKNYIENHNLNKNEDQNISDLVNDIHVSPALKRGITQSIKIVQEIVKFMGHAPKHIFIEVTRETKKSEITTSREKRIKRLQSKLLNKANDFKPQLREYLVPNKKIQEELKKHKNDLSSERIMLYFLQNGKSLYSEESLNINKLSDYQVDHILPRTYIPDDSLENKALVLAKENQRKADDLLLNSNVIDRNLERWTYMLNNNMIGLKKFKNLTRRVITDKDKLGFIHRQLVQTSQMVKGVANILDNMYKNQGTTCIQARANLSTAFRKALSGQDDTYHFKHPELVKNRNVNDFHHAQDAYLASFLGTYRLRRFPTNEMLLMNGEYNKFYGQVKELYSKKKKLPDSRKNGFIISPLVNGTTQYDRNTGEIIWNVGFRDKILKIFNYHQCNVTRKTEIKTGQFYDQTIYSPKNPKYKKLIAQKKDMDPNIYGGFSGDNKSSITIVKIDNNKIKPVAIPIRLINDLKDKKTLQNWLEENVKHKKSIQIIKNNVPIGQIIYSKKVGLLSLNSDREVANRQQLILPPEHSALLRLLQIPDEDLDQILAFYDKNILVEILQELITKMKKFYPFYKGEREFLIANIENFNQATTSEKVNSLEELITLLHANSTSAHLIFNNIEKKAFGRKTHGLTLNNTDFIYQSVTGLYETRIHIE

SEQ ID NO: 87 - protein, 1096 aa, Eubacterium dolichum
MMEVFMGRLVLGLDIGITSVGFGIIDLDESEIVDYGVRLFKEGTAAENETRRTKRGGRRLKRRRVTRREDMLHLLKQAGIISTSFHPLNNPYDVRVKGLNERLNGEELATALLHLCKHRGSSVETIEDDEAKAKEAGETKKVLSMNDQLLKSGKYVCEIQKERLRTNGHIRGHENNFKTRAYVDEAFQILSHQDLSNELKSAIITIISRKRMYYDGPGGPLSPTPYGRYTYFGQKEPIDLIEKMRGKCSLFPNEPRAPKLAYSAELFNLLNDLNNLSIEGEKLTSEQKAMILKIVHEKGKITPKQLAKEVGVSLEQIRGFRIDTKGSPLLSELTGYKMIREVLEKSNDEHLEDHVFYDEIAEILTKTKDIEGRKKQISELSSDLNEESVHQLAGLTKFTAYHSLSFKALRLINEEMLKTELNQMQSITLFGLKQNNELSVKGMKNIQADDTAILSPVAKRAQRETFKVVNRLREIYGEFDSIVVEMAREKNSEEQRKAIRERQKFFEMRNKQVADIIGDDRKINAKLREKLVLYQEQDGKTAYSLEPIDLKLLIDDPNAYEVDHIIPISISLDDSITNKVLVTHRENQEKGNLTPISAFVKGRFTKGSLAQYKAYCLKLKEKNIKTNKGYRKKVEQYLLNENDIYKYDIQKEFINRNLVDTSYASRVVLNTLTTYFKQNEIPTKVFTVKGSLTNAFRRKINLKKDRDEDYGHHAIDALIIASMPKMRLLSTIFSRYKIEDIYDESTGEVFSSGDDSMYYDDRYFAFIASLKAIKVRKFSHKIDTKPNRSVADETIYSTRVIDGKEKVVKKYKDIYDPKFTALAEDILNNAYQEKYLMALHDPQTFDQIVKVVNYYFEEMSKSEKYFTKDKKGRIKISGMNPLSLYRDEHGMLKKYSKKGDGPAITQMKYFDGVLGNHIDISAHYQVRDKKVVLQQISPYRTDFYYSKENGYKFVTIRYKDVRWSEKKKKYVIDQQDYAMKKAEKKIDDTYEFQFSMHRDELIGITKAEGEALIYPDETWHNFNFFFHAGETPEILKFTATNNDKSNKIEVKPIHCYCKMRLMPTISKKIVRIDKYATDVVGNLYKVKKNTLKFEFD

SEQ ID NO: 88 - protein, 1132 aa, Nitratifractor salsuginis
MKKILGVDLGITSFGYAILQETGKDLYRCLDNSVVMRNNPYDEKSGESSQSIRSTQKSMRRLIEKRKKRIRCVAQTMERYGILDYSETMKINDPKNNPIKNRWQLRAVDAWKRPLSPQELFAIFAHMAKHRGYKSIATEDLIYELELELGLNDPEKESEKKADERRQVYNALRHLEELRKKYGGETIAQTIHRAVEAGDLRSYRNHDDYEKMIRREDIEEEIEKVLLRQAELGALGLPEEQVSELIDELKACITDQEMPTIDESLFGKCTFYKDELAAPAYSYLYDLYRLYKKLADLNIDGYEVTQEDREKVIEWVEKKIAQGKNLKKITHKDLRKILGLAPEQKIFGVEDERIVKGKKEPRTFVPFFFLADIAKFKELFASIQKHPDALQIFRELAEILQRSKTPQEALDRLRALMAGKGIDTDDRELLELFKNKRSGTRELSHRYILEALPLFLEGYDEKEVQRILGFDDREDYSRYPKSLRHLHLREGNLFEKEENPINNHAVKSLASWALGLIADLSWRYGPFDEIILETTRDALPEKIRKEIDKAMREREKALDKIIGKYKKEFPSIDKRLARKIQLWERQKGLDLYSGKVINLSQLLDGSADIEHIVPQSLGGLSTDYNTIVTLKSVNAAKGNRLPGDWLAGNPDYRERIGMLSEKGLIDWKKRKNLLAQSLDEIYTENTHSKGIRATSYLEALVAQVLKRYYPFPDPELRKNGIGVRMIPGKVTSKTRSLLGIKSKSRETNFHHAEDALILSTLTRGWQNRLHRMLRDNYGKSEAELKELWKKYMPHIEGLTLADYIDEAFRRFMSKGEESLFYRDMFDTIRSISYWVDKKPLSASSHKETVYSSRHEVPTLRKNILEAFDSLNVIKDRHKLTTEEFMKRYDKEIRQKLWLHRIGNTNDESYRAVEERATQIAQILTRYQLMDAQNDKEIDEKFQQALKELITSPIEVTGKLLRKMRFVYDKLNAMQIDRGLVETDKNMLGIHISKGPNEKLIFRRMDVNNAHELQKERSGILCYLNEMLFIFNKKGLIHYGCLRSYLEKGQGSKYIALFNPRFPANPKAQPSKFTSDSKIKQVGIGSATGIIKAHLDLDGHVRSYEVFGTLPEGSIEWFKEESGYGRVEDDPHH

SEQ ID NO: 89 - protein, 1173 aa, Rhodospirillum rubrum
MRPIEPWILGLDIGTDSLGWAVFSCEEKGPPTAKELLGGGVRLFDSGRDAKDHTSRQAERGAFRRARRQTRTWPWRRDRLIALFQAAGLTPPAAETRQIALALRREAVSRPLAPDALWAALLHLAHHRGFRSNRIDKRERAAAKALAKAKPAKATAKATAPAKEADDEAGFWEGAEAALRQRMAASGAPTVGALLADDLDRGQPVRMRYNQSDRDGVVAPTRALIAEELAEIVARQSSAYPGLDWPAVTRLVLDQRPLRSKGAGPCAFLPGEDRALRALPTVQDFIIRQTLANLRLPSTSADEPRPLTDEEHAKALALLSTARFVEWPALRRALGLKRGVKFTAETERNGAKQAARGTAGNLTEAILAPLIPGWSGWDLDRKDRVFSDLWAARQDRSALLALIGDPRGPTRVTEDETAEAVADAIQIVLPTGRASLSAKAARAIAQAMAPGIGYDEAVTLALGLHHSHRPRQERLARLPYYAAALPDVGLDGDPVGPPPAEDDGAAAEAYYGRIGNISVHIALNETRKIVNALLHRHGPILRLVMVETTRELKAGADERKRMIAEQAERERENAEIDVELRKSDRWMANARERRQRVRLARRQNNLCPYTSTPIGHADLLGDAYDIDHVIPLARGGRDSLDNMVLCQSDANKTKGDKTPWEAFHDKPGWIAQRDDFLARLDPQTAKALAWRFADDAGERVARKSAEDEDQGFLPRQLTDTGYIARVALRYLSLVTNEPNAVVATNGRLTGLLRLAWDITPGPAPRDLLPTPRDALRDDTAARRFLDGLTPPPLAKAVEGAVQARLAALGRSRVADAGLADALGLTLASLGGGGKNRADHRHHFIDAAMIAVTTRGLINQINQASGAGRILDLRKWPRTNFEPPYPTFRAEVMKQWDHIHPSIRPAHRDGGSLHAATVFGVRNRPDARVLVQRKPVEKLFLDANAKPLPADKIAEIIDGFASPRMAKRFKALLARYQAAHPEVPPALAALAVARDPAFGPRGMTANTVIAGRSDGDGEDAGLITPFRANPKAAVRTMGNAVYEVWEIQVKGRPRWTHRVLTRFDRTQPAPPPPPENARLVMRLRRGDLVYWPLESGDRLFLVKKMAVDGRLALWPARLATGKATALYAQLSCPNINLNGDQGYCVQSAEGIRKEKIRTTSCTALGRLRLSKKAT

SEQ ID NO: 90 - protein, 1348 aa, Finegoldia magna
MKSEKKYYIGLDVGTNSVGWAVTDEFYNILRAKGKDLWGVRLFEKADTAANTRIFRSGRRRNDRKGMRLQILREIFEDEIKKVDKDFYDRLDESKFWAEDKKVSGKYSLFNDKNFSDKQYFEKFPTIFHLRKYLMEEHGKVDIRYYFLAINQMMKRRGHFLIDGQISHVTDDKPLKEQLILLINDLLKIELEEELMDSIFEILADVNEKRTDKKNNLKELIKGQDFNKQEGNILNSIFESIVTGKAKIKNIISDEDILEKIKEDNKEDFVLTGDSYEENLQYFEEVLQENITLFNTLKSTYDFLILQSILKGKSTLSDAQVERYDEHKKDLEILKKVIKKYDEDGKLFKQVFKEDNGNGYVSYIGYYLNKNKKITAKKKISNIEFTKYVKGILEKQCDCEDEDVKYLLGKIEQENFLLKQISSINSVIPHQIHLFELDKILENLAKNYPSFNNKKEEFTKIEKIRKTFTFRIPYYVGPLNDYHKNNGGNAWIFRNKGEKIRPWNFEKIVDLHKSEEEFIKRMLNQCTYLPEETVLPKSSILYSEYMVLNELNNLRINGKPLDTDVKLKLIEELFKKKTKVTLKSIRDYMVRNNFADKEDFDNSEKNLEIASNMKSYIDFNNILEDKFDVEMVEDLIEKITIHTGNKKLLKKYIEETYPDLSSSQIQKIINLKYKDWGRLSRKLLDGIKGTKKETEKTDTVINFLRNSSDNLMQIIGSQNYSFNEYIDKLRKKYIPQEISYEVVENLYVSPSVKKMIWQVIRVTEEITKVMGYDPDKIFIEMAKSEEEKKTTISRKNKLLDLYKAIKKDERDSQYEKLLTGLNKLDDSDLRSRKLYLYYTQMGRDMYTGEKIDLDKLFDSTHYDKDHIIPQSMKKDDSIINNLVLVNKNANQTTKGNIYPVPSSIRNNPKIYNYWKYLMEKEFISKEKYNRLIRNTPLTNEELGGFINRQLVETRQSTKAIKELFEKFYQKSKIIPVKASLASDLRKDMNTLKSREVNDLHHAHDAFLNIVAGDVWNREFTSNPINYVKENREGDKVKYSLSKDFTRPRKSKGKVIWTPEKGRKLIVDTLNKPSVLISNESHVKKGELFNATIAGKKDYKKGKIYLPLKKDDRLQDVSKYGGYKAINGAFFFLVEHTKSKKRIRSIELFPLHLLSKFYEDKNTVLDYAINVLQLQDPKIIIDKINYRTEIIIDNFSYLISTKSNDGSITVKPNEQMYWRVDEISNLKKIENKYKKDAILTEEDRKIMESYIDKIYQQFKAGKYKNRRTTDTIIEKYEIIDLDTLDNKQLYQLLVAFISLSYKTSNNAVDFTVIGLGTECGKPRITNLPDNTYLVYKSITGIYEKRIRIK

SEQ ID NO: 91 - protein, 1114 aa, Eubacterium rectale
MNYTEKEKLFMKYILALDIGIASVGWAILDKESETVIEAGSNIFPEASAADNQLRRDMRGAKRNNRRLKTRINDFIKLWENNNLSIPQFKSTEIVGLKVRAITEEITLDELYLILYSYLKHRGISYLEDALDDTVSGSSAYANGLKLNAKELETHYPCEIQQERLNTIGKYRGQSQIINENGEVLDLSNVFTIGAYRKEIQRVFEIQKKYHPELTDEFCDGYMLIFNRKRKYYEGPGNEKSRTDYGRFTTKLDANGNYITEDNIFEKLIGKCSVYPDELRAAAASYTAQEYNVLNDLNNLTINGRKLEENEKHEIVERIKSSNTINMRKIISDCMGENIDDFAGARIDKSGKEIFHKFEVYNKMRKALLEIGIDISNYSREELDEIGYIMTINTDKEAMMEAFQKSWIDLSDDVKQCLINMRKTNGALFNKWQSFSLKIMNELIPEMYAQPKEQMTLLTEMGVTKGTQEEFAGLKYIPVDVVSEDIFNPVVRRSVRISFKILNAVLKKYKALDTIVIEMPRDRNSEEQKKRINDSQKLNEKEMEYIEKKLAVTYGIKLSPSDFSSQKQLSLKLKLWNEQDGICLYSGKTIDPNDIINNPQLFEIDHIIPRSISFDDARSNKVLVYRSENQKKGNQTPYYYLTHSHSEWSFEQYKATVMNLSKKKEYAISRKKIQNLLYSEDITKMDVLKGFINRNINDTSYASRLVLNTIQNFFMANEADTKVKVIKGSYTHQMRCNLKLDKNRDESYSHHAVDAMLIGYSELGYEAYHKLQGEFIDFETGEILRKDMWDENMSDEVYADYLYGKKWANIRNEVVKAEKNVKYWHYVMRKSNRGLCNQTIRGTREYDGKQYKINKLDIRTKEGIKVFAKLAFSKKDSDRERLLVYLNDRRTFDDLCKIYEDYSDAANPFVQYEKETGDIIRKYSKKHNGPRIDKLKYKDGEVGACIDISHKYGFEKGSKKVILESLVPYRMDVYYKEENHSYYLVGVKQSDIKFEKGRNVIDEEAYARILVNEKMIQPGQSRADLENLGFKFKLSFYKNDIIEYEKDGKIYTERLVSRTMPKQRNYIETKPIDKAKFEKQNLVGLGKTKFIKKYRYDILGNKYSCSEEKFTSFC

SEQ ID NO: 92 - protein, 1084 aa, Corynebacterium diphtheriae
MKYHVGIDVGTFSVGLAAIEVDDAGMPIKTLSLVSHIHDSGLDPDKIKSAVTRLASSGIARRTRRLYRRKRRRLQQLDKFIQRQGWPVIELEDYSDPLYPWKVRAELAASYIADEKERGEKLSVALRHIARHRGWRNPYAKVSSLYLPDEPSDAFKAIREEIKRASGQPVPETATVGQMVTLCELGTLKLRGEGGVLSARLQQSDHAREIQEICRMQEIGQELYRKIIDVVFAAESPKGSASSRVGKDPLQPGKNRALKASDAFQRYRIAALIGNLRVRVDGEKRILSVEEKNLVFDHLVNLAPKKEPEWVTIAEILGIDRGQLIGTATMTDDGERAGARPPTHDTNRSIVNSRIAPLVDWWKTASALEQHAMVKALSNAEVDDFDSPEGAKVQAFFADLDDDVHAKLDSLHLPVGRAAYSEDTLVRLTRRMLADGVDLYTARLQEFGIEPSWTPPAPRIGEPVGNPAVDRVLKTVSRWLESATKTWGAPERVIIEHVREGFVTEKRAREMDGDMRRRAARNAKLFQEMQEKLNVQGKPSRADLWRYQSVQRQNCQCAYCGSPITFSNSEMDHIVPRAGQGSTNTRENLVAVCHRCNQSKGNTPFAIWAKNTSIEGVSVKEAVERTRHWVTDTGMRSTDFKKFTKAVVERFQRATMDEEIDARSMESVAWMANELRSRVAQHFASHGTTVRVYRGSLTAEARRASGISGKLEFLDGVGKSRLDRRHHAIDAAVIAFTSDYVAETLAVRSNLKQSQAHRQEAPQWREFTGKDAEHRAAWRVWCQKMEKLSALLTEDLRDDRVVVMSNVRLRLGNGSAHEETIGKLSKVKLGSQLSVSDIDKASSEALWCALTREPDFDPKDGLPANPERHIRVNGTHVYAGDNIGLFPVSAGSIALRGGYAELGSSFHHARVYKITSGKKPAFAMLRVYTIDLLPYRNQDLFSVELKPQTMSMRQAEKKLRDALATGNAEYLGWLVVDDELVVDTSKIATDQVKAVEAELGTIRRWRVDGFFGDTRLRLRPLQMSKEGIKKESAPELSKIIDRPGWLPAVNKLFSEGNVTVVRRDSLGRVRLESTAHLPVTWKVQ

SEQ ID NO: 93 - protein, 1152 aa, Roseburia inulinivorans
MNAEHGKEGLLIMEENFQYRIGLDIGITSVGWAVLQNNSQDEPVRITDLGVRIFDVAENPKNGDALAAPRRDARTTRRRLRRRRHRLERIKFLLQENGLIEMDSFMERYYKGNLPDVYQLRYEGLDRKLKDEELAQVLIHIAKHRGFRSTRKAETKEKEGGAVLKATTENQKIMQEKGYRTVGEMLYLDEAFHTECLWNEKGYVLTPRNRPDDYKHTILRSMLVEEVHAIFAAQRAHGNQKATEGLEEAYVEIMTSQRSFDMGPGLQPDGKPSPYAMEGFGDRVGKCTFEKDEYRAPKATYTAELFVALQKINHTKLIDEFGTGRFFSEEERKTIIGLLLSSKELKYGTIRKKLNIDPSLKFNSLNYSAKKEGETEEERVLDTEKAKFASMFWTYEYSKCLKDRTEEMPVGEKADLFDRIGEILTAYKNDDSRSSRLKELGLSGEEIDGLLDLSPAKYQRVSLKAMRKMQPYLEDGLIYDKACEAAGYDFRALNDGNKKHLLKGEEINAIVNDITNPVVKRSVSQTIKVINAIIQKYGSPQAVNIELAREMSKNFQDRTNLEKEMKKRQQENERAKQQIIELGKQNPTGQDILKYRLWNDQGGYCLYSGKKIPLEELFDGGYDIDHILPYSITFDDSYRNKVLVTAQENRQKGNRTPYEYFGADEKRWEDYEASVRLLVRDYKKQQKLLKKNFTEEERKEFKERNLNDTKYITRVVYNMIRQNLELEPFNHPEKKKQVWAVNGAVTSYLRKRWGLMQKDRSTDRHHAMDAVVIACCTDGMIHKISRYMQGRELAYSRNFKFPDEETGEILNRDNFTREQWDEKFGVKVPLPWNSFRDELDIRLLNEDPKNFLLTHADVQRELDYPGWMYGEEESPIEEGRYINYIRPLFVSRMPNHKVTGSAHDATIRSARDYETRGVVITKVPLTDLKLNKDNEIEGYYDKDSDRLLYQALVRQLLLHGNDGKKAFAEDFHKPKADGTEGPVVRKVKIEKKQTSGVMVRGGTGIAANGEMVRIDVFRENGKYYFVPVYTADVVRKVLPNRAATHTKPYSEWRVMDDANFVFSLYSRDLIHVKSKKDIKTNLVNGGLLLQKEIFAYYTGADIATASIAGFANDSNFKFRGLGIQSLEIFEKCQVDILGNISVVRHENRQEFH

SEQ ID NO: 94 - protein, 1029 aa, Alicycliphilus denitrificans
MRSLRYRLALDLGSTSLGWALFRLDACNRPTAVIKAGVRIFSDGRNPKDGSSLAVTRRAARAMRRRRDRLLKRKTRMQAKLVEHGFFPADAGKRKALEQLNPYALRAKGLQEALLPGEFARALFHINQRRGFKSNRKTDKKDNDSGVLKKAIGQLRQQMAEQGSRTVGEYLWTRLQQGQGVRARYREKPYTTEEGKKRIDKSYDLYIDRAMIEQEFDALWAAQAAFNPTLFHEAARADLKDTLLHQRPLRPVKPGRCTLLPEEERAPLALPSTQRFRIHQEVNHLRLLDENLREVALTLAQRDAVVTALETKAKLSFEQIRKLLKLSGSVQFNLEDAKRTELKGNATSAALARKELFGAAWSGFDEALQDEIVWQLVTEEGEGALIAWLQTHTGVDEARAQAIVDVSLPEGYGNLSRKALARIVPALRAAVITYDKAVQAAGFDHHSQLGFEYDASEVEDLVHPETGEIRSVFKQLPYYGKALQRHVAFGSGKPEDPDEKRYGKIANPTVHIGLNQVRMVVNALIRRYGRPTEVVIELARDLKQSREQKVEAQRRQADNQRRNARIRRSIAEVLGIGEERVRGSDIQKWICWEELSFDAADRRCPYSGVQISAAMLLSDEVEVEHILPFSKTLDDSLNNRTVAMRQANRIKRNRTPWDARAEFEAQGWSYEDILQRAERMPLRKRYRFAPDGYERWLGDDKDFLARALNDTRYLSRVAAEYLRLVCPGTRVIPGQLTALLRGKFGLNDVLGLDGEKNRNDHRHHAVDACVIGVTDQGLMQRFATASAQARGDGLTRLVDGMPMPWPTYRDHVERAVRHIWVSHRPDHGFEGAMMEETSYGIRKDGSIKQRRKADGSAGREISNLIRIHEATQPLRHGVSADGQPLAYKGYVGGSNYCIEITVNDKGKWEGEVISTFRAYGVVRAGGMGRLRNPHEGQNGRKLIMRLVIGDSVRLEVDGAERTMRIVKISGSNGQIFMAPIHEANVDARNTDKQDAFTYTSKYAGSLQKAKTRRVTISPIGEVRDPGFKG

SEQ ID NO: 95 - protein, 1179 aa, Sphaerochaeta globosa
MSKKVSRRYEEQAQEICQRLGSRPYSIGLDLGVGSIGVAVAAYDPIKKQPSDLVFVSSRIFIPSTGAAERRQKRGQRNSLRHRANRLKFLWKLLAERNLMLSYSEQDVPDPARLRFEDAVVRANPYELRLKGLNEQLTLSELGYALYHIANHRGSSSVRTFLDEEKSSDDKKLEEQQAMTEQLAKEKGISTFIEVLTAFNTNGLIGYRNSESVKSKGVPVPTRDIISNEIDVLLQTQKQFYQEILSDEYCDRIVSAILFENEKIVPEAGCCPYFPDEKKLPRCHFLNEERRLWEAINNARIKMPMQEGAAKRYQSASFSDEQRHILFHIARSGTDITPKLVQKEFPALKTSIIVLQGKEKAIQKIAGFRFRRLEEKSFWKRLSEEQKDDFFSAWTNTPDDKRLSKYLMKHLLLTENEVVDALKTVSLIGDYGPIGKTATQLLMKHLEDGLTYTEALERGMETGEFQELSVWEQQSLLPYYGQILTGSTQALMGKYWHSAFKEKRDSEGFFKPNTNSDEEKYGRIANPVVHQTLNELRKLMNELITILGAKPQEITVELARELKVGAEKREDIIKQQTKQEKEAVLAYSKYCEPNNLDKRYIERFRLLEDQAFVCPYCLEHISVADIAAGRADVDHIFPRDDTADNSYGNKVVAHRQCNDIKGKRTPYAAFSNTSAWGPIMHYLDETPGMWRKRRKFETNEEEYAKYLQSKGFVSRFESDNSYIAKAAKEYLRCLFNPNNVTAVGSLKGMETSILRKAWNLQGIDDLLGSRHWSKDADTSPTMRKNRDDNRHHGLDAIVALYCSRSLVQMINTMSEQGKRAVEIEAMIPIPGYASEPNLSFEAQRELFRKKILEFMDLHAFVSMKTDNDANGALLKDTVYSILGADTQGEDLVFVVKKKIKDIGVKIGDYEEVASAIRGRITDKQPKWYPMEMKDKIEQLQSKNEAALQKYKESLVQAAAVLEESNRKLIESGKKPIQLSEKTISKKALELVGGYYYLISNNKRTKTFVVKEPSNEVKGFAFDTGSNLCLDFYHDAQGKLCGEIIRKIQAMNPSYKPAYMKQGYSLYVRLYQGDVCELRASDLTEAESNLAKTTHVRLPNAKPGRTFVIIITFTEMGSGYQIYFSNLAKSKKGQDTSFTLTTIKNYDVRKVQLSSAGLVRYVSPLLVDKIEKDEVALCGE

SEQ ID NO: 96 - protein, 1374 aa, Fusobacterium nucleatum
MKKQKFSDYYLGFDIGTNSVGWCVTDLDYNVLRFNKKDMWGSRLFDEAKTAAERRVQRNSRRRLKRRKWRLNLLEEIFSDEIMKIDSNFFRRLKESSLWLEDKNSKEKFTLFNDDNYKDYDFYKQYPTIFHLRDELIKNPEKKDIRLIYLALHSIFKSRGHFLFEGQNLKEIKNFETLYNNLISFLEDNGINKSIDKDNIEKLEKIICDSGKGLKDKEKEFKGIFNSDKQLVAIFKLSVGSSVSLNDLFDTDEYKKEEVEKEKISFREQIYEDDKPIYYSILGEKIELLDIAKSFYDFMVLNNILSDSNYISEAKVKLYEEHKKDLKNLKYIIRKYNKENYDKLFKDKNENNYPAYIGLNKEKDKKEVVEKSRLKIDDLIKVIKGYLPKPERIEEKDKTIFNEILNKIELKTILPKQRISDNGTLPYQIHEVELEKILENQSKYYDFLNYEENGVSTKDKLLKTFKFRIPYYVGPLNSYHKDKGGNSWIVRKEEGKILPWNFEQKVDIEKSAEEFIKRMTNKCTYLNGEDVIPKDSFLYSEYIILNELNKVQVNDEFLNEENKRKIIDELFKENKKVSEKKFKEYLLVNQIANRTVELKGIKDSFNSNYVSYIKFKDIFGEKLNLDIYKEISEKSILWKCLYGDDKKIFEKKIKNEYGDILNKDEIKKINSFKFNTWGRLSEKLLTGIEFINLETGECYSSVMEALRRTNYNLMELLSSKFTLQESIDNENKEMNEVSYRDLIEESYVSPSLKRAILQTLKIYEEIKKITGRVPKKVFIEMARGGDESMKNKKIPARQEQLKKLYDSCGNDIANFSIDIKEMKNSLSSYDNNSLRQKKLYLYYLQFGKCMYTGREIDLDRLLQNNDTYDIDHIYPRSKVIKDDSFDNLVLVLKNENAEKSNEYPVKKEIQEKMKSFWRFLKEKNFISDEKYKRLTGKDDFELRGFMARQLVNVRQTTKEVGKILQQIEPEIKIVYSKAEIASSFREMFDFIKVRELNDTHHAKDAYLNIVAGNVYNTKFTEKPYRYLQEIKENYDVKKIYNYDIKNAWDKENSLEIVKKNMEKNTVNITRFIKEEKGELFNLNPIKKGETSNEIISIKPKLYDGKDNKLNEKYGYYTSLKAAYFIYVEHEKKNKKVKTFERITRIDSTLIKNEKNLIKYLVSQKKLLNPKIIKKIYKEQTLIIDSYPYTFTGVDSNKKVELKNKKQLYLEKKYEQILKNALKFVEDNQGETEENYKFIYLKKRNNNEKNETIDAVKERYNIEFNEMYDKFLEKLSSKDYKNYINNKLYTNFLNSKEKFKKLKLWEKSLILREFLKIFNKNTYGKYEIKDSQTKEKLFSFPEDTGRIRLGQSSLGNNKELLEESVTGLFVKKIKL

SEQ ID NO: 97 - protein, 1056 aa, Pasteurella multocida
MQTTNLSYILGLDLGIASVGWAVVEINENEDPIGLIDVGVRIFERAEVPKTGESLALSRRLARSTRRLIRRRAHRLLLAKRFLKREGILSTIDLEKGLPNQAWELRVAGLERRLSAIEWGAVLLHLIKHRGYLSKRKNESQTNNKELGALLSGVAQNHQLLQSDDYRTPAELALKKFAKEEGHIRNQRGAYTHTFNRLDLLAELNLLFAQQHQFGNPHCKEHIQQYMTELLMWQKPALSGEAILKMLGKCTHEKNEFKAAKHTYSAERFVWLTKLNNLRILEDGAERALNEEERQLLINHPYEKSKLTYAQVRKLLGLSEQAIFKHLRYSKENAESATFMELKAWHAIRKALENQGLKDTWQDLAKKPDLLDEIGTAFSLYKTDEDIQQYLTNKVPNSVINALLVSLNFDKFIELSLKSLRKILPLMEQGKRYDQACREIYGHHYGEANQKTSQLLPAIPAQEIRNPVVLRTLSQARKVINAIIRQYGSPARVHIETGRELGKSFKERREIQKQQEDNRTKRESAVQKFKELFSDFSSEPKSKDILKFRLYEQQHGKCLYSGKEINIHRLNEKGYVEIDHALPFSRTWDDSFNNKVLVLASENQNKGNQTPYEWLQGKINSERWKNFVALVLGSQCSAAKKQRLLTQVIDDNKFIDRNLNDTRYIARFLSNYIQENLLLVGKNKKNVFTPNGQITALLRSRWGLIKARENNNRHHALDAIVVACATPSMQQKITRFIRFKEVHPYKIENRYEMVDQESGEIISPHFPEPWAYFRQEVNIRVFDNHPDTVLKEMLPDRPQANHQFVQPLFVSRAPTRKMSGQGHMETIKSAKRLAEGISVLRIPLTQLKPNLLENMVNKEREPALYAGLKARLAEFNQDPAKAFATPFYKQGGQQVKAIRVEQVQKSGVLVRENNGVADNASIVRTDVFIKNNKFFLVPIYTWQVAKGILPNKAIVAHKNEDEWEEMDEGAKFKFSLFPNDLVELKTKKEYFFGYYIGLDRATGNISLKEHDGEISKGKDGVYRVGVKLALSFEKYQVDELGKNRQICRPQQRQPVR

SEQ ID NO: 98 - protein, 1113 aa, Alcanivorax pacificus
MRYRVGLDLGTASVGAAVFSMDEQGNPMELIWHYERLFSEPLVPDMGQLKPKKAARRLARQQRRQIDRRASRLRRIAIVSRRLGIAPGRNDSGVHGNDVPTLRAMAVNERIELGQLRAVLLRMGKKRGYGGTFKAVRKVGEAGEVASGASRLEEEMVALASVQNKDSVTVGEYLAARVEHGLPSKLKVAANNEYYAPEYALFRQYLGLPAIKGRPDCLPNMYALRHQIEHEFERIWATQSQFHDVMKDHGVKEEIRNAIFFQRPLKSPADKVGRCSLQTNLPRAPRAQIAAQNFRIEKQMADLRWGMGRRAEMLNDHQKAVIRELLNQQKELSFRKIYKELERAGCPGPEGKGLNMDRAALGGRDDLSGNTTLAAWRKLGLEDRWQELDEVTQIQVINFLADLGSPEQLDTDDWSCRFMGKNGRPRNFSDEFVAFMNELRMTDGFDRLSKMGFEGGRSSYSIKALKALTEWMIAPHWRETPETHRVDEEAAIRECYPESLATPAQGGRQSKLEPPPLTGNEVVDVALRQVRHTINMMIDDLGSVPAQIVVEMAREMKGGVTRRNDIEKQNKRFASERKKAAQSIEENGKTPTPARILRYQLWIEQGHQCPYCESNISLEQALSGAYTNFEHILPRTLTQIGRKRSELVLAHRECNDEKGNRTPYQAFGHDDRRWRIVEQRANALPKKSSRKTRLLLLKDFEGEALTDESIDEFADRQLHESSWLAKVTTQWLSSLGSDVYVSRGSLTAELRRRWGLDTVIPQVRFESGMPVVDEEGAEITPEEFEKFRLQWEGHRVTREMRTDRRPDKRIDHRHHLVDAIVTALTSRSLYQQYAKAWKVADEKQRHGRVDVKVELPMPILTIRDIALEAVRSVRISHKPDRYPDGRFFEATAYGIAQRLDERSGEKVDWLVSRKSLTDLAPEKKSIDVDKVRANISRIVGEAIRLHISNIFEKRVSKGMTPQQALREPIEFQGNILRKVRCFYSKADDCVRIEHSSRRGHHYKMLLNDGFAYMEVPCKEGILYGVPNLVRPSEAVGIKRAPESGDFIRFYKGDTVKNIKTGRVYTIKQILGDGGGKLILTPVTETKPADLLSAKWGRLKVGGRNIHLLRLCAE

SEQ ID NO: 99 - protein, 1236 aa, Mycoplasma mobile
  source 1..1236: note = Mycoplasma mobile 163K
MYFYKNKENKLNKKVVLGLDLGIASVGWCLTDISQKEDNKFPIILHGVRLFETVDDSDDKLLNETRRKKRGQRRRNRRLFTRKRDFIKYLIDNNIIELEFDKNPKILVRNFIEKYINPFSKNLELKYKSVTNLPIGFHNLRKAAINEKYKLDKSELIVLLYFYLSLRGAFFDNPEDTKSKEMNKNEIEIFDKNESIKNAEFPIDKIIEFYKISGKIRSTINLKFGHQDYLKEIKQVFEKQNIDFMNYEKFAMEEKSFFSRIRNYSEGPGNEKSFSKYGLYANENGNPELIINEKGQKIYTKIFKTLWESKIGKCSYDKKLYRAPKNSFSAKVFDITNKLTDWKHKNEYISERLKRKILLSRFLNKDSKSAVEKILKEENIKFENLSEIAYNKDDNKINLPIINAYHSLTTIFKKHLINFENYLISNENDLSKLMSFYKQQSEKLFVPNEKGSYEINQNNNVLHIFDAISNILNKFSTIQDRIRILEGYFEFSNLKKDVKSSEIYSEIAKLREFSGTSSLSFGAYYKFIPNLISEGSKNYSTISYEEKALQNQKNNFSHSNLFEKTWVEDLIASPTVKRSLRQTMNLLKEIFKYSEKNNLEIEKIVVEVTRSSNNKHERKKIEGINKYRKEKYEELKKVYDLPNENTTLLKKLWLLRQQQGYDAYSLRKIEANDVINKPWNYDIDHIVPRSISFDDSFSNLVIVNKLDNAKKSNDLSAKQFIEKIYGIEKLKEAKENWGNWYLRNANGKAFNDKGKFIKLYTIDNLDEFDNSDFINRNLSDTSYITNALVNHLTFSNSKYKYSVVSVNGKQTSNLRNQIAFVGIKNNKETEREWKRPEGFKSINSNDFLIREEGKNDVKDDVLIKDRSFNGHHAEDAYFITIISQYFRSFKRIERLNVNYRKETRELDDLEKNNIKFKEKASFDNFLLINALDELNEKLNQMRFSRMVITKKNTQLFNETLYSGKYDKGKNTIKKVEKLNLLDNRTDKIKKIEEFFDEDKLKENELTKLHIFNHDKNLYETLKIIWNEVKIEIKNKNLNEKNYFKYFVNKKLQEGKISFNEWVPILDNDFKIIRKIRYIKFSSEEKETDEIIFSQSNFLKIDQRQNFSFHNTLYWVQIWVYKNQKDQYCFISIDARNSKFEKDEIKINYEKLKTQKEKLQIINEEPILKINKGDLFENEEKELFYIVGRDEKPQKLEIKYILGKKIKDQKQIQKPVKKYFPNWKKVNLTYMGEIFKK

SEQ ID NO: 100 - protein, 1397 aa, unidentified
  source 1..1397: note = Gamma proteobacterium HTCC5015
MTKNYISPIAIDLGAKFTGVALYQYLEGADCTQEVAKGLLVDDRGNVTWSQEGRRGKRHQVRGYKRRKMAKRLLWLILDSEYGIKREEVTEPLLKFINGLLNRRGYTYISEEVDEESMNVSPLPFSEMMPDYFNSSAPLLEQLAKLLSDKNKLVRFRAEGKIPSNKNEFKKLLDTALDGKYKDEKKELSEAWGNILIASENVLKSTVDGHKSRSEYLANIKEDIKSNEELEKQISSKEIDGFYNLVGHLSNFQLRLLRKYFNDPNMSGVSYWDEKRLEKYFYQWVQGWHTKGGTDEAEKKNIILKTKGAPLLKTLKSLSADLTIPPYEDQNNRRPPKCQSVLLSDEKLTMHYPKWKEWVGQLVKQNDNAYLNENVTLANALHRIVERSRSIDPYQLRLLISITDAEKRNDLAGYKRLKLSLGSEVDEFLLLVKNIVDETKEAREGLWFETENKLFFKCGKTPPRKEKLKSTLLSAVLGKNLSDDEQSSFIEEFWKSGTPKIERRNVRGWCRLASQVQKTYGVYLKEYGLQQLHKLEAGKKLDDKPLALLYKNSGLIASKIGEALNIEPDEVSRFASPHSLAQIFNIIEGDVAGFNKTCRACTYENIWRMQEEKVESLLTNQLLSEIHGERKVPLKSAMCTRLSADSTRPFDGQMASIIEHIARKIAQHKIAQINDVPKEFSIDIPIIIESNQFSFTAELEEIKRGRGSAKAKKAKELGEKSKAGWVSKTERIKTSSEGICPYTGAPLGGSGEIDHIIPRSLTGRTKKTVFNSEANLIYCSSKGNHDKGNRVYVIEQLNDKYLKKQFSTSDVNLIKKKIKTTIQRFTEGGEKLRSFSELSREDQKAFRHALFVPELKSEVTSLLAVKNITRVNGTQAWLAKKIASLLAEHLDKQGRDYTLSAHQIDPWSVSKQRKMLASAEPIWAKKDPQPAASHVVDAVCTFLEALEQPHTASRLKTISSTSFEKTGWRSALIPDLIKVDALDRRPKYRRYNIGSTSLFKDGIYAERFLPILIDENGLMAGYDIDNSLKAKGADVVFESLSPFLLFKGEEVGAQSLSDWQERIDGRYLYMSIDKVKAFDYLQEKVGEKDIAAELLNSIHFTQRKTELRAKFSDDSGKKMKTLDAIRKSLKLTVTVNEIGKRKEKCGFSGTIGIPAKSAWENLLDEPLLETYWGTKMPPQEIWEKVYRKHFPRNIPNQAHRKVRKDFSLPVVDSVSGGFRVKRKTPNGYNYQLLAIDGYSAVGFKKEGDNVDFKSPALVPQIAESKSVTPISSELVHLDKNEIVYFDEWRKIDISDSDLKQFVSSLELAPGSQNRFYIRFTVDEDQFERHFKSALRVNGIQDLDTVNKTFDWNREIPSLLIPPRSNLFLLETGQKITFEYIANGANAEVKKAYSLRRA

SEQ ID NO: 101 - protein, 1333 aa, Planococcus antarcticus
MKNYTIGLDIGVASVGWVCIDENYKILNYNNRHAFGVHEFESAESAAGRRLKRGMRRRYNRRKKRLQLLQSLFDSYITDSGFFSKTDSQHFWKNNNEFENRSLTEVLSSLRISSRKYPTIYHLRSDLIESNKKMDLRLVYLALHNLVKYRGHFLQEGNWSEAASAEGMDDQLLELVTRYAELENLSPLDLSESQWKAAETLLLNRNLTKTDQSKELTAMFGKEYEPFCKLVAGLGVSLHQLFPSSEQALAYKETKTKVQLSNENVEEVMELLLEEESALLEAVQPFYQQVVLYELLKGETYVAKAKVSAFKQYQKDMASLKNLLDKTFGEKVYRSYFISDKNSQREYQKSHKVEVLCKLDQFNKEAKFAETFYKDLKKLLEDKSKTSIGTTEKDEMLRIIKAIDSNQFLQKQKGIQNAAIPHQNSLYEAEKILRNQQAHYPFITTEWIEKVKQILAFRIPYYIGPLVKDTTQSPFSWVERKGDAPITPWNFDEQIDKAASAEAFISRMRKTCTYLKGQEVLPKSSLTYERFEVLNELNGIQLRTTGAESDFRHRLSYEMKCWIIDNVFKQYKTVSTKRLLQELKKSPYADELYDEHTGEIKEVFGTQKENAFATSLSGYISMKSILGAVVDDNPAMTEELIYWIAVFEDREILHLKIQEKYPSITDVQRQKLALVKLPGWGRFSRLLIDGLPLDEQGQSVLDHMEQYSSVFMEVLKNKGFGLEKKIQKMNQHQVDGTKKIRYEDIEELAGSPALKRGIWRSVKIVEELVSIFGEPANIVLEVAREDGEKKRTKSRKDQWEELTKTTLKNDPDLKSFIGEIKSQGDQRFNEQRFWLYVTQQGKCLYTGKALDIQNLSMYEVDHILPQNFVKDDSLDNLALVMPEANQRKNQVGQNKMPLEIIEANQQYAMRTLWERLHELKLISSGKLGRLKKPSFDEVDKDKFIARQLVETRQIIKHVRDLLDERFSKSDIHLVKAGIVSKFRRFSEIPKIRDYNNKHHAMDALFAAALIQSILGKYGKNFLAFDLSKKDRQKQWRSVKGSNKEFFLFKNFGNLRLQSPVTGEEVSGVEYMKHVYFELPWQTTKMTQTGDGMFYKESIFSPKVKQAKYVSPKTEKFVHDEVKNHSICLVEFTFMKKEKEVQETKFIDLKVIEHHQFLKEPESQLAKFLAEKETNSPIIHARIIRTIPKYQKIWIEHFPYYFISTRELHNARQFEISYELMEKVKQLSERSSVEELKIVFGLLIDQMNDNYPIYTKSSIQDRVQKFVDTQLYDFKSFEIGFEELKKAVAANAQRSDTFGSRISKKPKPEEVAIGYESITGLKYRKPRSVVGTKR

SEQ ID NO: 102 - protein, 1424 aa, Prevotella sp.
  source 1..1424: note = Prevotella sp. C561
MTQKVLGLDLGTNSIGSAVRNLDLSDDLQWQLEFFSSDIFRSSVNKESNGREYSLAAQRSAHRRSRGLNEVRRRRLWATLNLLIKHGFCPMSSESLMRWCTYDKRKGLFREYPIDDKDFNAWILLDFNGDGRPDYSSPYQLRRELVTRQFDFEQPIERYKLGRALYHIAQHRGFKSSKGETLSQQETNSKPSSTDEIPDVAGAMKASEEKLSKGLSTYMKEHNLLTVGAAFAQLEDEGVRVRNNNDYRAIRSQFQHEIETIFKFQQGLSVESELYERLISEKKNVGTIFYKRPLRSQRGNVGKCTLERSKPRCAIGHPLFEKFRAWTLINNIKVRMSVDTLDEQLPMKLRLDLYNECFLAFVRTEFKFEDIRKYLEKRLGIHFSYNDKTINYKDSTSVAGCPITARFRKMLGEEWESFRVEGQKERQAHSKNNISFHRVSYSIEDIWHFCYDAEEPEAVLAFAQETLRLERKKAEELVRIWSAMPQGYAMLSQKAIRNINKILMLGLKYSDAVILAKVPELVDVSDEELLSIAKDYYLVEAQVNYDKRINSIVNGLIAKYKSVSEEYRFADHNYEYLLDESDEKDIIRQIENSLGARRWSLMDANEQTDILQKVRDRYQDFFRSHERKFVESPKLGESFENYLTKKFPMVEREQWKKLYHPSQITIYRPVSVGKDRSVLRLGNPDIGAIKNPTVLRVLNTLRRRVNQLLDDGVISPDETRVVVETARELNDANRKWALDTYNRIRHDENEKIKKILEEFYPKRDGISTDDIDKARYVIDQREVDYFTGSKTYNKDIKKYKFWLEQGGQCMYTGRTINLSNLFDPNAFDIEHTIPESLSFDSSDMNLTLCDAHYNRFIKKNHIPTDMPNYDKAITIDGKEYPAITSQLQRWVERVERLNRNVEYWKGQARRAQNKDRKDQCMREMHLWKMELEYWKKKLERFTVTEVTDGFKNSQLVDTRVITRHAVLYLKSIFPHVDVQRGDVTAKFRKILGIQSVDEKKDRSLHSHHAIDATTLTIIPVSAKRDRMLELFAKIEEINKMLSFSGSEDRTGLIQELEGLKNKLQMEVKVCRIGHNVSEIGTFINDNIIVNHHIKNQALTPVRRRLRKKGYIVGGVDNPRWQTGDALRGEIHKASYYGAITQFAKDDEGKVLMKEGRPQVNPTIKFVIRRELKYKKSAADSGFASWDDLGKAIVDKELFALMKGQFPAETSFKDACEQGIYMIKKGKNGMPDIKLHHIRHVRCEAPQSGLKIKEQTYKSEKEYKRYFYAAVGDLYAMCCYTNGKIREFRIYSLYDVSCHRKSDIEDIPEFITDKKGNRLMLDYKLRTGDMILLYKDNPAELYDLDNVNLSRRLYKINRFESQSNLVLMTHHLSTSKERGRSLGKTVDYQNLPESIRSSVKSLNFLIMGENRDFVIKNGKIIFNHR

SEQ ID NO: 103 - protein, 1146 aa, Alicyclobacillus hesperidum
MAYRLGLDIGITSVGWAVVALEKDESGLKPVRIQDLGVRIFDKAEDSKTGASLALPRREARSARRRTRRRRHRLWRVKRLLEQHGILSMEQIEALYAQRTSSPDVYALRVAGLDRCLIAEEIARVLIHIAHRRGFQSNRKSEIKDSDAGKLLKAVQENENLMQSKGYRTVAEMLVSEATKTDAEGKLVHGKKHGYVSNVRNKAGEYRHTVSRQAIVDEVRKIFAAQRALGNDVMSEELEDSYLKILCSQRNFDDGPGGDSPYGHGSVSPDGVRQSIYERMVGSCTFETGEKRAPRSSYSFERFQLLTKVVNLRIYRQQEDGGRYPCELTQTERARVIDCAYEQTKITYGKLRKLLDMKDTESFAGLTYGLNRSRNKTEDTVFVEMKFYHEVRKALQRAGVFIQDLSIETLDQIGWILSVWKSDDNRRKKLSTLGLSDNVIEELLPLNGSKFGHLSLKAIRKILPFLEDGYSYDVACELAGYQFQGKTEYVKQRLLPPLGEGEVTNPVVRRALSQAIKVVNAVIRKHGSPESIHIELARELSKNLDERRKIEKAQKENQKNNEQIKDEIREILGSAHVTGRDIVKYKLFKQQQEFCMYSGEKLDVTRLFEPGYAEVDHIIPYGISFDDSYDNKVLVKTEQNRQKGNRTPLEYLRDKPEQKAKFIALVESIPLSQKKKNHLLMDKRAIDLEQEGFRERNLSDTRYITRALMNHIQAWLLFDETASTRSKRVVCVNGAVTAYMRARWGLTKDRDAGDKHHAADAVVVACIGDSLIQRVTKYDKFKRNALADRNRYVQQVSKSEGITQYVDKETGEVFTWESFDERKFLPNEPLEPWPFFRDELLARLSDDPSKNIRAIGLLTYSETEQIDPIFVSRMPTRKVTGAAHKETIRSPRIVKVDDNKGTEIQVVVSKVALTELKLTKDGEIKDYFRPEDDPRLYNTLRERLVQFGGDAKAAFKEPVYKISKDGSVRTPVRKVKIQEKLTLGVPVHGGRGIAENGGMVRIDVFAKGGKYYFVPIYVADVLKRELPNRLATAHKPYSEWRVVDDSYQFKFSLYPNDAVMIKPSREVDITYKDRKEPVGCRIMYFVSANIASASISLRTHDNSGELEGLGIQGLEVFEKYVVGPLGDTHPVYKERRMPFRVERKMN

SEQ ID NO: 104 - protein, 1363 aa, Lactobacillus rhamnosus
MTKLNQPYGIGLDIGSNSIGFAVVDANSHLLRLKGETAIGARLFREGQSAADRRGSRTTRRRLSRTRWRLSFLRDFFAPHITKIDPDFFLRQKYSEISPKDKDRFKYEKRLFNDRTDAEFYEDYPSMYHLRLHLMTHTHKADPREIFLAIHHILKSRGHFLTPGAAKDFNTDKVDLEDIFPALTEAYAQVYPDLELTFDLAKADDFKAKLLDEQATPSDTQKALVNLLLSSDGEKEIVKKRKQVLTEFAKAITGLKTKFNLALGTEVDEADASNWQFSMGQLDDKWSNIETSMTDQGTEIFEQIQELYRARLLNGIVPAGMSLSQAKVADYGQHKEDLELFKTYLKKLNDHELAKTIRGLYDRYINGDDAKPFLREDFVKALTKEVTAHPNEVSEQLLNRMGQANFMLKQRTKANGAIPIQLQQRELDQIIANQSKYYDWLAAPNPVEAHRWKMPYQLDELLNFHIPYYVGPLITPKQQAESGENVFAWMVRKDPSGNITPYNFDEKVDREASANTFIQRMKTTDTYLIGEDVLPKQSLLYQKYEVLNELNNVRINNECLGTDQKQRLIREVFERHSSVTIKQVADNLVAHGDFARRPEIRGLADEKRFLSSLSTYHQLKEILHEAIDDPTKLLDIENIITWSTVFEDHTIFETKLAEIEWLDPKKINELSGIRYRGWGQFSRKLLDGLKLGNGHTVIQELMLSNHNLMQILADETLKETMTELNQDKLKTDDIEDVINDAYTSPSNKKALRQVLRVVEDIKHAANGQDPSWLFIETADGTGTAGKRTQSRQKQIQTVYANAAQELIDSAVRGELEDKIADKASFTDRLVLYFMQGGRDIYTGAPLNIDQLSHYDIDHILPQSLIKDDSLDNRVLVNATINREKNNVFASTLFAGKMKATWRKWHEAGLISGRKLRNLMLRPDEIDKFAKGFVARQLVETRQIIKLTEQIAAAQYPNTKIIAVKAGLSHQLREELDFPKNRDVNHYHHAFDAFLAARIGTYLLKRYPKLAPFFTYGEFAKVDVKKFREFNFIGALTHAKKNIIAKDTGEIVWDKERDIRELDRIYNFKRMLITHEVYFETADLFKQTIYAAKDSKERGGSKQLIPKKQGYPTQVYGGYTQESGSYNALVRVAEADTTAYQVIKISAQNASKIASANLKSREKGKQLLNEIVVKQLAKRRKNWKPSANSFKIVIPRFGMGTLFQNAKYGLFMVNSDTYYRNYQELWLSRENQKLLKKLFSIKYEKTQMNHDALQVYKAIIDQVEKFFKLYDINQFRAKLSDAIERFEKLPINTDGNKIGKTETLRQILIGLQANGTRSNVKNLGIKTDLGLLQVGSGIKLDKDTQIVYQSPSGLFKRRIPLADL

SEQ ID NO: 105 - protein, 1150 aa, Enterococcus faecalis
MYSIGLDLGISSVGWSVIDERTGNVIDLGVRLFSAKNSEKNLERRTNRGGRRLIRRKTNRLKDAKKILAAVGFYEDKSLKNSCPYQLRVKGLTEPLSRGEIYKVTLHILKKRGISYLDEVDTEAAKESQDYKEQVRKNAQLLTKYTPGQIQLQRLKENNRVKTGINAQGNYQLNVFKVSAYANELATILKTQQAFYPNELTDDWIALFVQPGIAEEAGLIYRKRPYYHGPGNEANNSPYGRWSDFQKTGEPATNIFDKLIGKDFQGELRASGLSLSAQQYNLLNDLTNLKIDGEVPLSSEQKEYILTELMTKEFTRFGVNDVVKLLGVKKERLSGWRLDKKGKPEIHTLKGYRNWRKIFAEAGIDLATLPTETIDCLAKVLTLNTEREGIENTLAFELPELSESVKLLVLDRYKELSQSISTQSWHRFSLKTLHLLIPELMNATSEQNTLLEQFQLKSDVRKRYSEYKKLPTKDVLAEIYNPTVNKTVSQAFKVIDALLVKYGKEQIRYITIEMPRDDNEEDEKKRIKELHAKNSQRKNDSQSYFMQKSGWSQEKFQTTIQKNRRFLAKLLYYYEQDGICAYTGLPISPELLVSDSTEIDHIIPISISLDDSINNKVLVLSKANQVKGQQTPYDAWMDGSFKKINGKFSNWDDYQKWVESRHFSHKKENNLLETRNIFDSEQVEKFLARNLNDTRYASRLVLNTLQSFFTNQETKVRVVNGSFTHTLRKKWGADLDKTRETHHHHAVDATLCAVTSFVKVSRYHYAVKEETGEKVMREIDFETGEIVNEMSYWEFKKSKKYERKTYQVKWPNFREQLKPVNLHPRIKFSHQVDRKANRKLSDATIYSVREKTEVKTLKSGKQKITTDEYTIGKIKDIYTLDGWEAFKKKQDKLLMKDLDEKTYERLLSIAETTPDFQEVEEKNGKVKRVKRSPFAVYCEENDIPAIQKYAKKNNGPLIRSLKYYDGKLNKHINITKDSQGRPVEKTKNGRKVTLQSLKPYRYDIYQDLETKAYYTVQLYYSDLRFVEGKYGITEKEYMKKVAEQTKGQVVRFCFSLQKNDGLEIEWKDSQRYDVRFYNFQSANSINFKGLEQEMMPAENQFKQKPYNNGAINLNIAKYGKEGKKLRKFNTDILGKKHYLFYEKEPKNIIK

SEQ ID NO: 106 - protein, 1035 aa, unidentified
  source 1..1035: note = Candidatus Puniceispirillum marinum IMCC1322
MRRLGLDLGTNSIGWCLLDLGDDGEPVSIFRTGARIFSDGRDPKSLGSLKATRREARLTRRRRDRFIQRQKNLINALVKYGLMPADEIQRQALAYKDPYPIRKKALDEAIDPYEMGRAIFHINQRRGFKSNRKSADNEAGVVKQSIADLEMKLGEAGARTIGEFLADRQATNDTVRARRLSGTNALYEFYPDRYMLEQEFDTLWAKQAAFNPSLYIEAARERLKEIVFFQRKLKPQEVGRCIFLSDEDRISKALPSFQRFRIYQELSNLAWIDHDGVAHRITASLALRDHLFDELEHKKKLTFKAMRAILRKQGVVDYPVGFNLESDNRDHLIGNLTSCIMRDAKKMIGSAWDRLDEEEQDSFILMLQDDQKGDDEVRSILTQQYGLSDDVAEDCLDVRLPDGHGSLSKKAIDRILPVLRDQGLIYYDAVKEAGLGEANLYDPYAALSDKLDYYGKALAGHVMGASGKFEDSDEKRYGTISNPTVHIALNQVRAVVNELIRLHGKPDEVVIEIGRDLPMGADGKRELERFQKEGRAKNERARDELKKLGHIDSRESRQKFQLWEQLAKEPVDRCCPFTGKMMSISDLFSDKVEIEHLLPFSLTLDDSMANKTVCFRQANRDKGNRAPFDAFGNSPAGYDWQEILGRSQNLPYAKRWRFLPDAMKRFEADGGFLERQLNDTRYISRYTTEYISTIIPKNKIWVVTGRLTSLLRGFWGLNSILRGHNTDDGTPAKKSRDDHRHHAIDAIVVGMTSRGLLQKVSKAARRSEDLDLTRLFEGRIDPWDGFRDEVKKHIDAIIVSHRPRKKSQGALHNDTAYGIVEHAENGASTVVHRVPITSLGKQSDIEKVRDPLIKSALLNETAGLSGKSFENAVQKWCADNSIKSLRIVETVSIIPITDKEGVAYKGYKGDGNAYMDIYQDPTSSKWKGEIVSRFDANQKGFIPSWQSQFPTARLIMRLRINDLLKLQDGEIEEIYRVQRLSGSKILMAPHTEANVDARDRDKNDTFKLTSKSPGKLQSASARKVHISPTGLIREG

SEQ ID NO: 107 - protein, 1389 aa, Oenococcus kitaharae
  source 1..1389: note = Oenococcus kitaharae DSM 17330
MARDYSVGLDIGTSSVGWAAIDNKYHLIRAKSKNLIGVRLFDSAVTAEKRRGYRTTRRRLSRRHWRLRLLNDIFAGPLTDFGDENFLARLKYSWVHPQDQSNQAHFAAGLLFDSKEQDKDFYRKYPTIYHLRLALMNDDQKHDLREVYLAIHHLVKYRGHFLIEGDVKADSAFDVHTFADAIQRYAESNNSDENLLGKIDEKKLSAALTDKHGSKSQRAETAETAFDILDLQSKKQIQAILKSVVGNQANLMAIFGLDSSAISKDEQKNYKFSFDDADIDEKIADSEALLSDTEFEFLCDLKAAFDGLTLKMLLGDDKTVSAAMVRRFNEHQKDWEYIKSHIRNAKNAGNGLYEKSKKFDGINAAYLALQSDNEDDRKKAKKIFQDEISSADIPDDVKADFLKKIDDDQFLPIQRTKNNGTIPHQLHRNELEQIIEKQGIYYPFLKDTYQENSHELNKITALINFRVPYYVGPLVEEEQKIADDGKNIPDPTNHWMVRKSNDTITPWNLSQVVDLDKSGRRFIERLTGTDTYLIGEPTLPKNSLLYQKFDVLQELNNIRVSGRRLDIRAKQDAFEHLFKVQKTVSATNLKDFLVQAGYISEDTQIEGLADVNGKNFNNALTTYNYLVSVLGREFVENPSNEELLEEITELQTVFEDKKVLRRQLDQLDGLSDHNREKLSRKHYTGWGRISKKLLTTKIVQNADKIDNQTFDVPRMNQSIIDTLYNTKMNLMEIINNAEDDFGVRAWIDKQNTTDGDEQDVYSLIDELAGPKEIKRGIVQSFRILDDITKAVGYAPKRVYLEFARKTQESHLTNSRKNQLSTLLKNAGLSELVTQVSQYDAAALQNDRLYLYFLQQGKDMYSGEKLNLDNLSNYDIDHIIPQAYTKDNSLDNRVLVSNITNRRKSDSSNYLPALIDKMRPFWSVLSKQGLLSKHKFANLTRTRDFDDMEKERFIARSLVETRQIIKNVASLIDSHFGGETKAVAIRSSLTADMRRYVDIPKNRDINDYHHAFDALLFSTVGQYTENSGLMKKGQLSDSAGNQYNRYIKEWIHAARLNAQSQRVNPFGFVVGSMRNAAPGKLNPETGEITPEENADWSIADLDYLHKVMNFRKITVTRRLKDQKGQLYDESRYPSVLHDAKSKASINFDKHKPVDLYGGFSSAKPAYAALIKFKNKFRLVNVLRQWTYSDKNSEDYILEQIRGKYPKAEMVLSHIPYGQLVKKDGALVTISSATELHNFEQLWLPLADYKLINTLLKTKEDNLVDILHNRLDLPEMTIESAFYKAFDSILSFAFNRYALHQNALVKLQAHRDDFNALNYEDKQQTLERILDALHASPASSDLKKINLSSGFGRLFSPSHFTLADTDEFIFQSVTGLFSTQKTVAQLYQETK

SEQ ID NO: 108 - protein, 1024 aa, Helicobacter mustelae
MIRTLGIDIGIASIGWAVIEGEYTDKGLENKEIVASGVRVFTKAENPKNKESLALPRTLARSARRRNARKKGRIQQVKHYLSKALGLDLECFVQGEKLATLFQTSKDFLSPWELRERALYRVLDKEELARVILHIAKRRGYDDITYGVEDNDSGKIKKAIAENSKRIKEEQCKTIGEMMYKLYFQKSLNVRNKKESYNRCVGRSELREELKTIFQIQQELKSPWVNEELIYKLLGNPDAQSKQEREGLIFYQRPLKGFGDKIGKCSHIKKGENSPYRACKHAPSAEEFVALTKSINFLKNLTNRHGLCFSQEDMCVYLGKILQEAQKNEKGLTYSKLKLLLDLPSDFEFLGLDYSGKNPEKAVFLSLPSTFKLNKITQDRKTQDKIANILGANKDWEAILKELESLQLSKEQIQTIKDAKLNFSKHINLSLEALYHLLPLMREGKRYDEGVEILQERGIFSKPQPKNRQLLPPLSELAKEESYFDIPNPVLRRALSEFRKVVNALLEKYGGFHYFHIELTRDVCKAKSARMQLEKINKKNKSENDAASQLLEVLGLPNTYNNRLKCKLWKQQEEYCLYSGEKITIDHLKDQRALQIDHAFPLSRSLDDSQSNKVLCLTSSNQEKSNKTPYEWLGSDEKKWDMYVGRVYSSNFSPSKKRKLTQKNFKERNEEDFLARNLVDTGYIGRVTKEYIKHSLSFLPLPDGKKEHIRIISGSMTSTMRSFWGVQEKNRDHHLHHAQDAIIIACIEPSMIQKYTTYLKDKETHRLKSHQKAQILREGDHKLSLRWPMSNFKDKIQESIQNIIPSHHVSHKVTGELHQETVRTKEFYYQAFGGEEGVKKALKFGKIREINQGIVDNGAMVRVDIFKSKDKGKFYAVPIYTYDFAIGKLPNKAIVQGKKNGIIKDWLEMDENYEFCFSLFKNDCIKIQTKEMQEAVLAIYKSTNSAKATIELEHLSKYALKNEDEEKMFTDTDKEKNKTMTRESCGIQGLKVFQKVKLSVLGEVLEHKPRNRQNIALKTTPKHV

SEQ ID NO: 109 - protein, 1064 aa, Bradyrhizobium sp.
  source 1..1064: note = Bradyrhizobium sp. BTAi1
MKRTSLRAYRLGVDLGANSLGWFVVWLDDHGQPEGLGPGGVRIFPDGRNPQSKQSNAAGRRLARSARRRRDRYLQRRGKLMGLLVKHGLMPADEPARKRLECLDPYGLRAKALDEVLPLHHVGRALFHLNQRRGLFANRAIEQGDKDASAIKAAAGRLQTSMQACGARTLGEFLNRRHQLRATVRARSPVGGDVQARYEFYPTRAMVDAEFEAIWAAQAPHHPTMTAEAHDTIREAIFSQRAMKRPSIGKCSLDPATSQDDVDGFRCAWSHPLAQRFRIWQDVRNLAVVETGPTSSRLGKEDQDKVARALLQTDQLSFDEIRGLLGLPSDARFNLESDRRDHLKGDATGAILSARRHFGPAWHDRSLDRQIDIVALLESALDEAAIIASLGTTHSLDEAAAQRALSALLPDGYCRLGLRAIKRVLPLMEAGRTYAEAASAAGYDHALLPGGKLSPTGYLPYYGQWLQNDVVGSDDERDTNERRWGRLPNPTVHIGIGQLRRVVNELIRWHGPPAEITVELTRDLKLSPRRLAELEREQAENQRKNDKRTSLLRKLGLPASTHNLLKLRLWDEQGDVASECPYTGEAIGLERLVSDDVDIDHLIPFSISWDDSAANKVVCMRYANREKGNRTPFEAFGHRQGRPYDWADIAERAARLPRGKRWRFGPGARAQFEELGDFQARLLNETSWLARVAKQYLAAVTHPHRIHVLPGRLTALLRATWELNDLLPGSDDRAAKSRKDHRHHAIDALVAALTDQALLRRMANAHDDTRRKIEVLLPWPTFRIDLETRLKAMLVSHKPDHGLQARLHEDTAYGTVEHPETEDGANLVYRKTFVDISEKEIDRIRDRRLRDLVRAHVAGERQQGKTLKAAVLSFAQRRDIAGHPNGIRHVRLTKSIKPDYLVPIRDKAGRIYKSYNAGENAFVDILQAESGRWIARATTVFQANQANESHDAPAAQPIMRVFKGDMLRIDHAGAEKFVKIVRLSPSNNLLYLVEHHQAGVFQTRHDDPEDSFRWLFASFDKLREWNAELVRIDTLGQPWRRKRGLETGSEDATRIGWTRPKKWP

SEQ ID NO: 110 - protein, 1358 aa, Acidaminococcus sp.
MGKMYYLGLDIGTNSVGYAVTDPSYHLLKFKGEPMWGAHVFAAGNQSAERRSFRTSRRRLDRRQQRVKLVQEIFAPVISPIDPRFFIRLHESALWRDDVAETDKHIFFNDPTYTDKEYYSDYPTIHHLIVDLMESSEKHDPRLVYLAVAWLVAHRGHFLNEVDKDNIGDVLSFDAFYPEFLAFLSDNGVSPWVCESKALQATLLSRNSVNDKYKALKSLIFGSQKPEDNFDANISEDGLIQLLAGKKVKVNKLFPQESNDASFTLNDKEDAIEEILGTLTPDECEWIAHIRRLFDWAIMKHALKDGRTISESKVKLYEQHHHDLTQLKYFVKTYLAKEYDDIFRNVDSETTKNYVAYSYHVKEVKGTLPKNKATQEEFCKYVLGKVKNIECSEADKVDFDEMIQRLTDNSFMPKQVSGENRVIPYQLYYYELKTILNKAASYLPFLTQCGKDAISNQDKLLSIMTFRIPYFVGPLRKDNSEHAWLERKAGKIYPWNFNDKVDLDKSEEAFIRRMTNTCTYYPGEDVLPLDSLIYEKFMILNEINNIRIDGYPISVDVKQQVFGLFEKKRRVTVKDIQNLLLSLGALDKHGKLTGIDTTIHSNYNTYHHFKSLMERGVLTRDDVERIVERMTYSDDTKRVRLWLNNNYGTLTADDVKHISRLRKHDFGRLSKMFLTGLKGVHKETGERASILDFMWNTNDNLMQLLSECYTFSDEITKLQEAYYAKAQLSLNDFLDSMYISNAVKRPIYRTLAVVNDIRKACGTAPKRIFIEMARDGESKKKRSVTRREQIKNLYRSIRKDFQQEVDFLEKILENKSDGQLQSDALYLYFAQLGRDMYTGDPIKLEHIKDQSFYNIDHIYPQSMVKDDSLDNKVLVQSEINGEKSSRYPLDAAIRNKMKPLWDAYYNHGLISLKKYQRLTRSTPFTDDEKWDFINRQLVETRQSTKALAILLKRKFPDTEIVYSKAGLSSDFRHEFGLVKSRNINDLHHAKDAFLAIVTGNVYHERFNRRWFMVNQPYSVKTKTLFTHSIKNGNFVAWNGEEDLGRIVKMLKQNKNTIHFTRFSFDRKEGLFDIQPLKASTGLVPRKAGLDVVKYGGYDKSTAAYYLLVRFTLEDKKTQHKLMMIPVEGLYKARIDHDKEFLTDYAQTTISEILQKDKQKVINIMFPMGTRHIKLNSMISIDGFYLSIGGKSSKGKSVLCHAMVPLIVPHKIECYIKAMESFARKFKENNKLRIVEKFDKITVEDNLNLYELFLQKLQHNPYNKFFSTQFDVLTNGRSTFTKLSPEEQVQTLLNILSIFKTCRSSGCDLKSINGSAQAARIMISADLTGLSKKYSDIRLVEQSASGLFVSKSQNLLEYL

SEQ ID NO: 111 - protein, 1082 aa, Methylosinus trichosporium
MRVLGLDAGIASLGWALIEIEESNRGELSQGTIIGAGTWMFDAPEEKTQAGAKLKSEQRRTFRGQRRVVRRRRQRMNEVRRILHSHGLLPSSDRDALKQPGLDPWRIRAEALDRLLGPVELAVALGHIARHRGFKSNSKGAKTNDPADDTSKMKRAVNETREKLARFGSAAKMLVEDESFVLRQTPTKNGASEIVRRFRNREGDYSRSLLRDDLAAEMRALFTAQARFQSAIATADLQTAFTKAAFFQRPLQDSEKLVGPCPFEVDEKRAPKRGYSFELFRFLSRLNHVTLRDGKQERTLTRDELALAAADFGAAAKVSFTALRKKLKLPETTVFVGVKADEESKLDVVARSGKAAEGTARLRSVIVDALGELAWGALLCSPEKLDKIAEVISFRSDIGRISEGLAQAGCNAPLVDALTAAASDGRFDPFTGAGHISSKAARNILSGLRQGMTYDKACCAADYDHTASRERGAFDVGGHGREALKRILQEERISRELVGSPTARKALIESIKQVKAIVERYGVPDRIHVELARDVGKSIEEREEITRGIEKRNRQKDKLRGLFEKEVGRPPQDGARGKEELLRFELWSEQMGRCLYTDDYISPSQLVATDDAVQVDHILPWSRFADDSYANKTLCMAKANQDKKGRTPYEWFKAEKTDTEWDAFIVRVEALADMKGFKKRNYKLRNAEEAAAKFRNRNLNDTRWACRLLAEALKQLYPKGEKDKDGKERRRVFSRPGALTDRLRRAWGLQWMKKSTKGDRIPDDRHHALDAIVIAATTESLLQRATREVQEIEDKGLHYDLVKNVTPPWPGFREQAVEAVEKVFVARAERRRARGKAHDATIRHIAVREGEQRVYERRKVAELKLADLDRVKDAERNARLIEKLRNWIEAGSPKDDPPLSPKGDPIFKVRLVTKSKVNIALDTGNPKRPGTVDRGEMARVDVFRKASKKGKYEYYLVPIYPHDIATMKTPPIRAVQAYKPEDEWPEMDSSYEFCWSLVPMTYLQVISSKGEIFEGYYRGMNRSVGAIQLSAHSNSSDVVQGIGARTLTEFKKFNVDRFGRKHEVERELRTWRGETWRGKAYI

SEQ ID NO: 112 - protein, 1105 aa, Actinomyces coleocanis
MDNKNYRIGIDVGLNSIGFCAVEVDQHDTPLGFLNLSVYRHDAGIDPNGKKTNTTRLAMSGVARRTRRLFRKRKRRLAALDRFIEAQGWTLPDHADYKDPYTPWLVRAELAQTPIRDENDLHEKLAIAVRHIARHRGWRSPWVPVRSLHVEQPPSDQYLALKERVEAKTLLQMPEGATPAEMVVALDLSVDVNLRPKNREKTDTRPENKKPGFLGGKLMQSDNANELRKIAKIQGLDDALLRELIELVFAADSPKGASGELVGYDVLPGQHGKRRAEKAHPAFQRYRIASIVSNLRIRHLGSGADERLDVETQKRVFEYLLNAKPTADITWSDVAEEIGVERNLLMGTATQTADGERASAKPPVDVTNVAFATCKIKPLKEWWLNADYEARCVMVSALSHAEKLTEGTAAEVEVAEFLQNLSDEDNEKLDSFSLPIGRAAYSVDSLERLTKRMIENGEDLFEARVNEFGVSEDWRPPAEPIGARVGNPAVDRVLKAVNRYLMAAEAEWGAPLSVNIEHVREGFISKRQAVEIDRENQKRYQRNQAVRSQIADHINATSGVRGSDVTRYLAIQRQNGECLYCGTAITFVNSEMDHIVPRAGLGSTNTRDNLVATCERCNKSKSNKPFAVWAAECGIPGVSVAEALKRVDFWIADGFASSKEHRELQKGVKDRLKRKVSDPEIDNRSMESVAWMARELAHRVQYYFDEKHTGTKVRVFRGSLTSAARKASGFESRVNFIGGNGKTRLDRRHHAMDAATVAMLRNSVAKTLVLRGNIRASERAIGAAETWKSFRGENVADRQIFESWSENMRVLVEKFNLALYNDEVSIFSSLRLQLGNGKAHDDTITKLQMHKVGDAWSLTEIDRASTPALWCALTRQPDFTWKDGLPANEDRTIIVNGTHYGPLDKVGIFGKAAASLLVRGGSVDIGSAIHHARIYRIAGKKPTYGMVRVFAPDLLRYRNEDLFNVELPPQSVSMRYAEPKVREAIREGKAEYLGWLVVGDELLLDLSSETSGQIAELQQDFPGTTHWTVAGFFSPSRLRLRPVYLAQEGLGEDVSEGSKSIIAGQGWRPAVNKVFGSAMPEVIRRDGLGRKRRFSYSGLPVSWQG

SEQ ID NO: 113 - protein, 1442 aa, Caenispirillum sp.
  source 1..1442: note = Caenispirillum salinarum AK4
MPVLSPLSPNAAQGRRRWSLALDIGEGSIGWAVAEVDAEGRVLQLTGTGVTLFPSAWSNENGTYVAHGAADRAVRGQQQRHDSRRRRLAGLARLCAPVLERSPEDLKDLTRTPPKADPRAIFFLRADAARRPLDGPELFRVLHHMAAHRGIRLAELQEVDPPPESDADDAAPAATEDEDGTRRAAADERAFRRLMAEHMHRHGTQPTCGEIMAGRLRETPAGAQPVTRARDGLRVGGGVAVPTRALIEQEFDAIRAIQAPRHPDLPWDSLRRLVLDQAPIAVPPATPCLFLEELRRRGETFQGRTITREAIDRGLTVDPLIQALRIRETVGNLRLHERITEPDGRQRYVPRAMPELGLSHGELTAPERDTLVRALMHDPDGLAAKDGRIPYTRLRKLIGYDNSPVCFAQERDTSGGGITVNPTDPLMARWIDGWVDLPLKARSLYVRDVVARGADSAALARLLAEGAHGVPPVAAAAVPAATAAILESDIMQPGRYSVCPWAAEAILDAWANAPTEGFYDVTRGLFGFAPGEIVLEDLRRARGALLAHLPRTMAAARTPNRAAQQRGPLPAYESVIPSQLITSLRRAHKGRAADWSAADPEERNPFLRTWTGNAATDHILNQVRKTANEVITKYGNRRGWDPLPSRITVELAREAKHGVIRRNEIAKENRENEGRRKKESAALDTFCQDNTVSWQAGGLPKERAALRLRLAQRQEFFCPYCAERPKLRATDLFSPAETEIDHVIERRMGGDGPDNLVLAHKDCNNAKGKKTPHEHAGDLLDSPALAALWQGWRKENADRLKGKGHKARTPREDKDFMDRVGWRFEEDARAKAEENQERRGRRMLHDTARATRLARLYLAAAVMPEDPAEIGAPPVETPPSPEDPTGYTAIYRTISRVQPVNGSVTHMLRQRLLQRDKNRDYQTHHAEDACLLLLAGPAVVQAFNTEAAQHGADAPDDRPVDLMPTSDAYHQQRRARALGRVPLATVDAALADIVMPESDRQDPETGRVHWRLTRAGRGLKRRIDDLTRNCVILSRPRRPSETGTPGALHNATHYGRREITVDGRTDTVVTQRMNARDLVALLDNAKIVPAARLDAAAPGDTILKEICTEIADRHDRVVDPEGTHARRWISARLAALVPAHAEAVARDIAELADLDALADADRTPEQEARRSALRQSPYLGRAISAKKADGRARAREQEILTRALLDPHWGPRGLRHLIMREARAPSLVRIRANKTDAFGRPVPDAAVWVKTDGNAVSQLWRLTSVVTDDGRRIPLPKPIEKRIEISNLEYARLNGLDEGAGVTGNNAPPRPLRQDIDRLTPLWRDHGTAPGGYLGTAVGELEDKARSALRGKAMRQTLTDAGITAEAGWRLDSEGAVCDLEVAKGDTVKKDGKTYKVGVITQGIFGMPVDAAGSAPRTPEDCEKFEEQYGIKPWKAKGIPLA

SEQ ID NO: 114 - protein, 1384 aa, Coriobacterium glomerans
MKLRGIEDDYSIGLDMGTSSVGWAVTDERGTLAHFKRKPTWGSRLFREAQTAAVARMPRGQRRRYVRRRWRLDLLQKLFEQQMEQADPDFFIRLRQSRLLRDDRAEEHADYRWPLFNDCKFTERDYYQRFPTIYHVRSWLMETDEQADIRLIYLALHNIVKHRGNFLREGQSLSAKSARPDEALNHLRETLRVWSSERGFECSIADNGSILAMLTHPDLSPSDRRKKIAPLFDVKSDDAAADKKLGIALAGAVIGLKTEFKNIFGDFPCEDSSIYLSNDEAVDAVRSACPDDCAELFDRLCEVYSAYVLQGLLSYAPGQTISANMVEKYRRYGEDLALLKKLVKIYAPDQYRMFFSGATYPGTGIYDAAQARGYTKYNLGPKKSEYKPSESMQYDDFRKAVEKLFAKTDARADERYRMMMDRFDKQQFLRRLKTSDNGSIYHQLHLEELKAIVENQGRFYPFLKRDADKLVSLVSFRIPYYVGPLSTRNARTDQHGENRFAWSERKPGMQDEPIFPWNWESIIDRSKSAEKFILRMTGMCTYLQQEPVLPKSSLLYEEFCVLNELNGAHWSIDGDDEHRFDAADREGIIEELFRRKRTVSYGDVAGWMERERNQIGAHVCGGQGEKGFESKLGSYIFFCKDVFKVERLEQSDYPMIERIILWNTLFEDRKILSQRLKEEYGSRLSAEQIKTICKKRFTGWGRLSEKFLTGITVQVDEDSVSIMDVLREGCPVSGKRGRAMVMMEILRDEELGFQKKVDDFNRAFFAENAQALGVNELPGSPAVRRSLNQSIRIVDEIASIAGKAPANIFIEVTRDEDPKKKGRRTKRRYNDLKDALEAFKKEDPELWRELCETAPNDMDERLSLYFMQRGKCLYSGRAIDIHQLSNAGIYEVDHIIPRTYVKDDSLENKALVYREENQRKTDMLLIDPEIRRRMSGYWRMLHEAKLIGDKKFRNLLRSRIDDKALKGFIARQLVETGQMVKLVRSLLEARYPETNIISVKASISHDLRTAAELVKCREANDFHHAHDAFLACRVGLFIQKRHPCVYENPIGLSQVVRNYVRQQADIFKRCRTIPGSSGFIVNSFMTSGFDKETGEIFKDDWDAEAEVEGIRRSLNFRQCFISRMPFEDHGVFWDATIYSPRAKKTAALPLKQGLNPSRYGSFSREQFAYFFIYKARNPRKEQTLFEFAQVPVRLSAQIRQDENALERYARELAKDQGLEFIRIERSKILKNQLIEIDGDRLCITGKEEVRNACELAFAQDEMRVIRMLVSEKPVSRECVISLFNRILLHGDQASRRLSKQLKLALLSEAFSEASDNVQRNVVLGLIAIFNGSTNMVNLSDIGGSKFAGNVRIKYKKELASPKVNVHLIDQSVTGMFERRTKIGL

SEQ ID NO: 115 - protein, 4 aa, synthetic construct
AGGG

SEQ ID NO: 116 - protein, 1477 aa, synthetic construct
MSNFFKNFTNLYELSKTLRFELKPVGDTLTNMKDHLEYDEKLQTFLKDQNIDDAYQALKPQFDEIHEEFITDSLESKKAKEIDFSEYLDLFQEKKELNDSEKKLRNKIGETFNKAGEKWKKEKYPQYEWKKGSKIANGADILSCQDMLQFIKYKNPEDEKIKNYIDDTLKGFFTYFGGFNQNRANYYETKKEASTAVATRIVHENLPKFCDNVIQFKHIIKRKKDGTVEKTERKTEYLNAYQYLKNNNKITQIKDAETEKMIESTPIAEKIFDVYYFSSCLSQKQIEEYNRIIGHYNLLINLYNQAKRSEGKHLSANEKKYKDLPKFKTLYKQIGCGKKKDLFYTIKCDTEEEANKSRNEGKESHSVEEIINKAQEAINKYFKSNNDCENINTVPDFINYILTKENYEGVYWSKAAMNTISDKYFANYHDLQDRLKEAKVFQKADKKSEDDIKIPEAIELSGLFGVLDSLADWQTTLFKSSILSNEDKLKIITDSQTPSEALLKMIFNDIEKNMESFLKETNDIITLKKYKGNKEGTEKIKQWFDYTLAINRMLKYFLVKENKIKGNSLDTNISEALKTLIYSDDAEWFKWYDALRNYLTQKPQDEAKENKLKLNFDNPSLAGGWDVNKECSNFCVILKDKNEKKYLAIMKKGENTLFQKEWTEGRGKNLTKKSNPLFEINNCEILSKMEYDFWADVSKMIPKCSTQLKAVVNHFKQSDNEFIFPIGYKVTSGEKFREECKISKQDFELNNKVFNKNELSVTAMRYDLSSTQEKQYIKAFQKEYWELLFKQEKRDTKLTNNEIFNEWINFCNKKYSELLSWERKYKDALTNWINFCKYFLSKYPKTTLFNYSFKESENYNSLDEFYRDVDICSYKLNINTTINKSILDRLVEEGKLYLFEIKNQDSNDGKSIGHKNNLHTIYWNAIFENFDNRPKLNGEAEIFYRKAISKDKLGIVKGKKTKNGTEIIKNYRFSKEKFILHVPITLNFCSNNEYVNDIVNTKFYNFSNLHFLGIDRGEKHLAYYSLVNKNGEIVDQGTLNLPFTDKDGNQRSIKKEKYFYNKQEDKWEAKEVDCWNYNDLLDAMASNRDMARKNWQRIGTIKEAKNGYVSLVIRKIADLAVNNERPAFIVLEDLNTGFKRSRQKIDKSVYQKFELALAKKLNFLVDKNAKRDEIGSPTKALQLTPPVNNYGDIENKKQAGIMLYTRANYTSQTDPATGWRKTIYLKAGPEETTYKKDGKIKNKSVKDQIIETFTDIGFDGKDYYFEYDKGEFVDEKTGEIKPKKWRLYSGENGKSLDRFRGEREKDKYEWKIDKIDIVKILDDLFVNFDKNISLLKQLKEGVELTRNNEHGTGESLRFAINLIQQIRNTGNNERDNDFILSPVRDENGKHFDSREYWDKETKGEKISMPSSGDANGAFNIARKGIIMNAHILANSDSKDLSLFVSDEEWDLHLNNKTEWKKQLNIFSSRKAMAKRKK

SEQ ID NO: 117 - protein, 1403 aa, synthetic construct
MLFFMSTDITNKPREKGVFDNFTNLYEFSKTLTFGLIPLKWDDNKKMIVEDEDFSVLRKYGVIEEDKRIAESIKIAKFYLNILHRELIGKVLGSLKFEKKNLENYDRLLGEIEKNNKNENISEDKKKEIRKNFKKELSIAQDILLKKVGEVFESNGSGILSSKNCLDELTKRFTRQEVDKLRRENKDIGVEYPDVAYREKDGKEETKSFFAMDVGYLDDFHKNRKQLYSVKGKKNSLGRRILDNFEIFCKNKKLYEKYKNLDIDFSEIERNFNLTLEKVFDFDNYNERLTQEGLDEYAKILGGESNKQERTANIHGLNQIINLYIQKKQSEQKAEQKETGKKKIKFNKKDYPTFTCLQKQILSQVFRKEIIIESDRDLIRELKFFVEESKEKVDKARGIIEFLLNHEENDIDLAMVYLPKSKINSFVYKVFKEPQDFLSVFQDGASNLDFVSFDKIKTHLENNKLTYKIFFKTLIKENHDFESFLILLQQEIDLLIDGGETVTLGGKKESITSLDEKKNRLKEKLGWFEGKVRENEKMKDEEEGEFCSTVLAYSQAVLNITKRAEIFWLNEKQDAKVGEDNKDMIFYKKFDEFADDGFAPFFYFDKFGNYLKRRSRNTTKEIKLHFGNDDLLEGWDMNKEPEYWSFILRDRNQYYLGIGKKDGEIFHKKLGNSVEAVKEAYELENEADFYEKIDYKQLNIDRFEGIAFPKKTKTEEAFRQVCKKRADEFLGGDTYEFKILLAIKKEYDDFKARRQKEKDWDSKFSKEKMSKLIEYYITCLGKRDDWKRFNLNFRQPKEYEDRSDFVRHIQRQAYWIDPRKVSKDYVDKKVAEGEMFLFKVHNKDFYDFERKSEDKKNHTANLFTQYLLELFSCENIKNIKSKDLIESIFELDGKAEIRFRPKTDDVKLKIYQKKGKDVTYADKRDGNKEKEVIQHRRFAKDALTLHLKIRLNFGKHVNLFDFNKLVNTELFAKVPVKILGMDRGENNLIYYCFLDEHGEIENGKCGSLNRVGEQIITLEDDKKVKEPVDYFQLLVDREGQRDWEQKNWQKMTRIKDLKKAYLGNVVSWISKEMLSGIKEGVVTIGVLEDLNSNFKRTRFFRERQVYQGFEKALVNKLGYLVDKKYDNYRNVYQFAPIVDSVEEMEKNKQIGTLVYVPASYTSKICPHPKCGWRERLYMKNSASKEKIVGLLKSDGIKISYDQKNDRFYFEYQWEQEHKSDGKKKKYSGVDKVFSNVSRMRWDVEQKKSIDFVDGTDGSITNKLKSLLKGKGIELDNINQQIVNQQKELGVEFFQSIIFYFNLIMQIRNYDKEKSGSEADYIQCPSCLFDSRKPEMNGKLSAITNGDANGAYNIARKGFMQLCRIRENPQEPMKLITNREWDEAVREWDIYSAAQKIPVLSEEN

SEQ ID NO: 118 - protein, 1373 aa, synthetic construct
MLFQDFTHLYPLSKTVRFELKPIDRTLEHIHAKNFLSQDETMADMHQKVKVILDDYHRDFIADMMGEVKLTKLAEFYDVYLKFRKNPKDDELQKQLKDLQAVLRKEIVKPIGNGGKYKAGYDRLFGAKLFKDGKELGDLAKFVIAQEGESSPKLAHLAHFEKFSTYFTGFHDNRKNMYSDEDKHTAIAYRLIHENLPRFIDNLQILTTIKQKHSALYDQIINELTASGLDVSLASHLDGYHKLLTQEGITAYNTLLGGISGEAGSPKIQGINELINSHHNQHCHKSERIAKLRPLHKQILSDGMSVSFLPSKFADDSEMCQAVNEFYRHYADVFAKVQSLFDGFDDHQKDGIYVEHKNLNELSKQAFGDFALLGRVLDGYYVDVVNPEFNERFAKAKTDNAKAKLTKEKDKFIKGVHSLASLEQAIEHYTARHDDESVQAGKLGQYFKHGLAGVDNPIQKIHNNHSTIKGFLERERPAGERALPKIKSGKNPEMTQLRQLKELLDNALNVAHFAKLLTTKTTLDNQDGNFYGEFGVLYDELAKIPTLYNKVRDYLSQKPFSTEKYKLNFGNPTLLNGWDLNKEKDNFGVILQKDGCYYLALLDKAHKKVFDNAPNTGKSIYQKMIYKYLEVRKQFPKVFFSKEAIAINYHPSKELVEIKDKGRQRSDDERLKLYRFILECLKIHPKYDKKFEGAIGDIQLFKKDKKGREVPISEKDLFDKINGIFSSKPKLEMEDFFIGEFKRYNPSQDLVDQYNIYKKIDSNDNRKKENFYNNHPKFKKDLVRYYYESMCKHEEWEESFEFSKKLQDIGCYVDVNELFTEIETRRLNYKISFCNINADYIDELVEQGQLYLFQIYNKDFSPKAHGKPNLHTLYFKALFSEDNLADPIYKLNGEAQIFYRKASLDMNETTIHRAGEVLENKNPDNPKKRQFVYDIIKDKRYTQDKFMLHVPITMNFGVQGMTIKEFNKKVNQSIQQYDEVNVIGIDRGERHLLYLTVINSKGEILEQCSLNDITTASANGTQMTTPYHKILDKREIERLNARVGWGEIETIKELKSGYLSHVVHQISQLMLKYNAIVVLEDLNFGFKRGRFKVEKQIYQNFENALIKKLNHLVLKDKADDEIGSYKNALQLTNNFTDLKSIGKQTGFLFYVPAWNTSKIDPETGFVDLLKPRYENIAQSQAFFGKFDKICYNADKDYFEFHIDYAKFTDKAKNSRQIWTICSHGDKRYVYDKTANQNKGAAKGINVNDELKSLFARHHINEKQPNLVMDICQNNDKEFHKSLMYLLKTLLALRYSNASSDEDFILSPVANDEGVFFNSALADDTQPQNADANGAYHIALKGLWLLNELKNSDDLNKVKLAIDNQTWLNFAQNR

SEQ ID NO: 119 - protein, 1352 aa, synthetic construct
MENIFDQFIGKYSLSKTLRFELKPVGKTEDFLKINKVFEKDQTIDDSYNQAKFYFDSLHQKFIDAALASDKTSELSFQNFADVLEKQNKIILDKKREMGALRKRDKNAVGIDRLQKEINDAEDIIQKEKEKIYKDVRTLFDNEAESWKTYYQEREVDGKKITFSKADLKQKGADFLTAAGILKVLKYEFPEEKEKEFQAKNQPSLFVEEKENPGQKRYIFDSFDKFAGYLTKFQQTKKNLYAADGTSTAVATRIADNFIIFHQNTKVFRDKYKNNHTDLGFDEENIFEIERYKNCLLQREIEHIKNENSYNKIIGRINKKIKEYRDQKAKDTKLTKSDFPFFKNLDKQILGEVEKEKQLIEKTREKTEEDVLIERFKEFIENNEERFTAAKKLMNAFCNGEFESEYEGIYLKNKAINTISRRWFVSDRDFELKLPQQKSKNKSEKNEPKVKKFISIAEIKNAVEELDGDIFKAVFYDKKIIAQGGSKLEQFLVIWKYEFEYLFRDIERENGEKLLGYDSCLKIAKQLGIFPQEKEAREKATAVIKNYADAGLGIFQMMKYFSLDDKDRKNTPGQLSTNFYAEYDGYYKDFEFIKYYNEFRNFITKKPFDEDKIKLNFENGALLKGWDENKEYDFMGVILKKEGRLYLGIMHKNHRKLFQSMGNAKGDNANRYQKMIYKQIADASKDVPRLLLTSKKAMEKFKPSQEILRIKKEKTFKRESKNFSLRDLHALIEYYRNCIPQYSNWSFYDFQFQDTGKYQNIKEFTDDVQKYGYKISFRDIDDEYINQALNEGKMYLFEVVNKDIYNTKNGSKNLHTLYFEHILSAENLNDPVFKLSGMAEIFQRQPSVNEREKITTQKNQCILDKGDRAYKYRRYTEKKIMFHMSLVLNTGKGEIKQVQFNKIINQRISSSDNEMRVNVIGIDRGEKNLLYYSVVKQNGEIIEQASLNEINGVNYRDKLIEREKERLKNRQSWKPVVKIKDLKKGYISHVIHKICQLIEKYSAIVVLEDLNMRFKQIRGGIERSVYQQFEKALIDKLGYLVFKDNRDLRAPGGVLNGYQLSAPFVSFEKMRKQTGILFYTQAEYTSKTDPITGFRKNVYISNSASLDKIKEAVKKFDAIGWDGKEQSYFFKYNPYNLADEKYKNSTVSKEWAIFASAPRIRRQKGEDGYWKYDRVKVNEEFEKLLKVWNFVNPKATDIKQEIIKKEKAGDLQGEKELDGRLRNFWHSFIYLFNLVLELRNSFSLQIKIKAGEVIAVDEGVDFIASPVKPFFTTPNPYIPSNLCWLAVENADANGAYNIARKGVMILKKIREHAKKDPEFKKLPNLFISNAEWDEAARDWGKYAGTTALNLDH

SEQ ID NO: 120 - protein, 1334 aa, synthetic construct
MSSLTKFTNKYSKQLTIKNELIPVGKTLENIKENGLIDGDEQLNENYQKAKIIVDDFLRDFINKALNNTQIGNWRELADALNKEDEDNIEKLQDKIRGIIVSKFETFDLFSSYSIKKDEKIIDDDNDVEEEELDLGKKTSSFKYIFKKNLFKLVLPSYLKTTNQDKLKIISSFDNFSTYFRGFFENRKNIFTKKPISTSIAYRIVHDNFPKFLDNIRCFNVWQTECPQLIVKADNYLKSKNVIAKDKSLANYFTVGAYDYFLSQNGIDFYNNIIGGLPAFAGHEKIQGLNEFINQECQKDSELKSKLKNRHAFKMAVLFKQILSDREKSFVIDEFESDAQVIDAVKNFYAEQCKDNNVIFNLLNLIKNIAFLSDDELDGIFIEGKYLSSVSQKLYSDWSKLRNDIEDSANSKQGNKELAKKIKTNKGDVEKAISKYEFSLSELNSIVHDNTKFSDLLSCTLHKVASEKLVKVNEGDWPKHLKNNEEKQKIKEPLDALLEIYNTLLIFNCKSFNKNGNFYVDYDRCINELSSVVYLYNKTRNYCTKKPYNTDKFKLNFNSPQLGEGFSKSKENDCLTLLFKKDDNYYVGIIRKGAKINFDDTQAIADNTDNCIFKMNYFLLKDAKKFIPKCSIQLKEVKAHFKKSEDDYILSDKEKFASPLVIKKSTFLLATAHVKGKKGNIKKFQKEYSKENPTEYRNSLNEWIAFCKEFLKTYKAATIFDITTLKKAEEYADIVEFYKDVDNLCYKLEFCPIKTSFIENLIDNGDLYLFRINNKDFSSKSTGTKNLHTLYLQAIFDERNLNNPTIMLNGGAELFYRKESIEQKNRITHKAGSILVNKVCKDGTSLDDKIRNEIYQYENKFIDTLSDEAKKVLPNVIKKEATHDITKDKRFTSDKFFFHCPLTINYKEGDTKQFNNEVLSFLRGNPDINIIGIDRGERNLIYVTVINQKGEILDSVSFNTVTNKSSKIEQTVDYEEKLAVREKERIEAKRSWDSISKIATLKEGYLSAIVHEICLLMIKHNAIVVLENLNAGFKRIRGGLSEKSVYQKFEKMLINKLNYFVSKKESDWNKPSGLLNGLQLSDQFESFEKLGIQSGFIFYVPAAYTSKIDPTTGFANVLNLSKVRNVDAIKSFFSNFNEISYSKKEALFKFSFDLDSLSKKGFSSFVKFSKSKWNVYTFGERIIKPKNKQGYREDKRINLTFEMKKLLNEYKVSFDLENNLIPNLTSANLKDTFWKELFFIFKTTLQLRNSVTNGKEDVLISPVKNAKGEFFVSGTHNKTLPQDCDANGAYHIALKGLMILERNNLVREEKDTKKIMAISNVDWFEYVQKRRGVL

SEQ ID NO: 121 - protein, 1331 aa, synthetic construct
MKPVGKTEDFLKINKVFEKDQTIDDSYNQAKFYFDSLHQKFIDAALASDKTSELSFQNFADVLEKQNKIILDKKREMGALRKRDKNAVGIDRLQKEINDAEDIIQKEKEKIYKDVRTLFDNEAESWKTYYQEREVDGKKITFSKADLKQKGADFLTAAGILKVLKYEFPEEKEKEFQAKNQPSLFVEEKENPGQKRYIFDSFDKFAGYLTKFQQTKKNLYAADGTSTAVATRIADNFIIFHQNTKVFRDKYKNNHTDLGFDEENIFEIERYKNCLLQREIEHIKNENSYNKIIGRINKKIKEYRDQKAKDTKLTKSDFPFFKNLDKQILGEVEKEKQLIEKTREKTEEDVLIERFKEFIENNEERFTAAKKLMNAFCNGEFESEYEGIYLKNKAINTISRRWFVSDRDFELKLPQQKSKNKSEKNEPKVKKFISIAEIKNAVEELDGDIFKAVFYDKKIIAQGGSKLEQFLVIWKYEFEYLFRDIERENGEKLLGYDSCLKIAKQLGIFPQEKEAREKATAVIKNYADAGLGIFQMMKYFSLDDKDRKNTPGQLSTNFYAEYDGYYKDFEFIKYYNEFRNFITKKPFDEDKIKLNFENGALLKGWDENKEYDFMGVILKKEGRLYLGIMHKNHRKLFQSMGNAKGDNANRYQKMIYKQIADASKDVPRLLLTSKKAMEKFKPSQEILRIKKEKTFKRESKNFSLRDLHALIEYYRNCIPQYSNWSFYDFQFQDTGKYQNIKEFTDDVQKYGYKISFRDIDDEYINQALNEGKMYLFEVVNKDIYNTKNGSKNLHTLYFEHILSAENLNDPVFKLSGMAEIFQRQPSVNEREKITTQKNQCILDKGDRAYKYRRYTEKKIMFHMSLVLNTGKGEIKQVQFNKIINQRISSSDNEMRVNVIGIDRGEKNLLYYSVVKQNGEIIEQASLNEINGVNYRDKLIEREKERLKNRQSWKPVVKIKDLKKGYISHVIHKICQLIEKYSAIVVLEDLNMRFKQIRGGIERSVYQQFEKALIDKLGYLVFKDNRDLRAPGGVLNGYQLSAPFVSFEKMRKQTGILFYTQAEYTSKTDPITGFRKNVYISNSASLDKIKEAVKKFDAIGWDGKEQSYFFKYNPYNLADEKYKNSTVSKEWAIFASAPRIRRQKGEDGYWKYDRVKVNEEFEKLLKVWNFVNPKATDIKQEIIKKEKAGDLQGEKELDGRLRNFWHSFIYLFNLVLELRNSFSLQIKIKAGEVIAVDEGVDFIASPVKPFFTTPNPYIPSNLCWLAVENADANGAYNIARKGVMILKKIREHAKKDPEFKKLPNLFISNAEWDEAARDWGKYAGTTALNLDH

SEQ ID NO: 122 - protein, 1326 aa, synthetic construct
MKVMENYQEFTNLFQLNKTLRFELKPIGKTCELLEEGKIFASGSFLEKDKVRADNVSYVKKEIDKKHKIFIEETLSSFSISNDLLKQYFDCYNELKAFKKDCKSDEEEVKKTALRNKCTSIQRAMREAISQAFLKSPQKKLLAIKNLIENVFKADENVQHFSEFTSYFSGFETNRENFYSDEEKSTSIAYRLVHDNLPIFIKNIYIFEKLKEQFDAKTLSEIFENYKLYVAGSSLDEVFSLEYFNNTLTQKGIDNYNAVIGKIVKEDKQEIQGLNEHINLYNQKHKDRRLPFFISLKKQILSDREALSWLPDMFKNDSEVIKALKGFYIEDGFENNVLTPLATLLSSLDKYNLNGIFIRNNEALSSLSQNVYRNFSIDEAIDANAELQTFNNYELIANALRAKIKKETKQGRKSFEKYEEYIDKKVKAIDSLSIQEINELVENYVSEFNSNSGNMPRKVEDYFSLMRKGDFGSNDLIENIKTKLSAAEKLLGTKYQETAKDIFKKDENSKLIKELLDATKQFQHFIKPLLGTGEEADRDLVFYGDFLPLYEKFEELTLLYNKVRNRLTQKPYSKDKIRLCFNKPKLMTGWVDSKTEKSDNGTQYGGYLFRKKNEIGEYDYFLGISSKAQLFRKNEAVIGDYERLDYYQPKANTIYGSAYEGENSYKEDKKRLNKVIIAYIEQIKQTNIKKSIIESISKYPNISDDDKVTPSSLLEKIKKVSIDSYNGILSFKSFQSVNKEVIDNLLKTISPLKNKAEFLDLINKDYQIFTEVQAVIDEICKQKTFIYFPISNVELEKEMGDKDKPLCLFQISNKDLSFAKTFSANLRKKRGAENLHTMLFKALMEGNQDNLDLGSGAIFYRAKSLDGNKPTHPANEAIKCRNVANKDKVSLFTYDIYKNRRYMENKFLFHLSIVQNYKAANDSAQLNSSATEYIRKADDLHIIGIDRGERNLLYYSVIDMKGNIVEQDSLNIIRNNDLETDYHDLLDKREKERKANRQNWEAVEGIKDLKKGYLSQAVHQIAQLMLKYNAIIALEDLGQMFVTRGQKIEKAVYQQFEKSLVDKLSYLVDKKRPYNELGGILKAYQLASSITKNNSDKQNGFLFYVPAWNTSKIDPVTGFTDLLRPKAMTIKEAQDFFGAFDNISYNDKGYFEFETNYDKFKIRMKSAQTRWTICTFGNRIKRKKDKNYWNYEEVELTEEFKKLFKDSNIDYENCNLKEEIQNKDNRKFFDDLIKLLQLTLQMRNSDDKGNDYIISPVANAEGQFFDSRNGDKKLPLDADANGAYNIARKGLWNIRQIKQTKNDKKLNLSISSTEWLDFVREKPYLK

SEQ ID NO: 123 - protein, 1318 aa, synthetic construct
MTNKFTNQYSLSKTLRFELIPQGKTLEFIQEKGLLSQDKQRAESYQEMKKTIDKFHKYFIDLALSNAKLTHLETYLELYNKSAETKKEQKFKDDLKKVQDNLRKEIVKSFSDGDAKSIFAILDKKELITVELEKWFENNEQKDIYFDEKFKTFTTYFTGFHQNRKNMYSVEPNSTAIAYRLIHENLPKFLENAKAFEKIKQVESLQVNFRELMGEFGDEGLIFVNELEEMFQINYYNDVLSQNGITIYNSIISGFTKNDIKYKGLNEYINNYNQTKDKKDRLPKLKQLYKQILSDRISLSFLPDAFTDGKQVLKAIFDFYKINLLSYTIEGQEESQNLLLLIRQTIENLSSFDTQKIYLKNDTHLTTISQQVFGDFSVFSTALNYWYETKVNPKFETEYSKANEKKREILDKAKAVFTKQDYFSIAFLQEVLSEYILTLDHTSDIVKKHSSNCIADYFKNHFVAKKENETDKTFDFIANITAKYQCIQGILENADQYEDELKQDQKLIDNLKFFLDAILELLHFIKPLHLKSESITEKDTAFYDVFENYYEALSLLTPLYNMVRNYVTQKPYSTEKIKLNFENAQLLNGWDANKEGDYLTTILKKDGNYFLAIMDKKHNKAFQKFPEGKENYEKMVYKLLPGVNKMLPKVFFSNKNIAYFNPSKELLENYKKETHKKGDTFNLEHCHTLIDFFKDSLNKHEDWKYFDFQFSETKSYQDLSGFYREVEHQGYKINFKNIDSEYIDGLVNEGKLFLFQIYSKDFSPFSKGKPNMHTLYWKALFEEQNLQNVIYKLNGQAEIFFRKASIKPKNIILHKKKIKIAKKHFIDKKTKTSEIVPVQTIKNLNMYYQGKISEKELTQDDLRYIDNFSIFNEKNKTIDIIKDKRFTVDKFQFHVPITMNFKATGGSYINQTVLEYLQNNPEVKIIGLDRGERHLVYLTLIDQQGNILKQESLNTITDSKISTPYHKLLDNKENERDLARKNWGTVENIKELKEGYISQVVHKIATLMLEENAIVVMEDLNFGFKRGRFKVEKQIYQKLEKMLIDKLNYLVLKDKQPQELGGLYNALQLTNKFESFQKMGKQSGFLFYVPAWNTSKIDPTTGFVNYFYTKYENVDKAKAFFEKFEAIRFNAEKKYFEFEVKKYSDFNPKAEGTQQAWTICTYGERIETKRQKDQNNKFVSTPINLTEKIEDFLGKNQIVYGDGNCIKSQIASKDDKAFFETLLYWFKMTLQMRNSETRTDIDYLISPVMNDNGTFYNSRDYEKLENPTLPKDADANGAYHIAKKGLMLLNKIDQADLTKKVDLSISNRDWLQFVQKNK

SEQ ID NO: 124 - protein, 1310 aa, synthetic construct
MFEKLSNIVSISKTIRFKLIPVGKTLENIEKLGKLEKDFERSDFYPILKNISDDYYRQYIKEKLSDLNLDWQKLYDAHELLDSSKKESQKNLEMIQAQYRKVLFNILSGELDKSGEKNSKDLIKNNKALYGKLFKKQFILEVLPDFVNNNDSYSEEDLEGLNLYSKFTTRLKNFWETRKNVFTDKDIVTAIPFRAVNENFGFYYDNIKIFNKNIEYLENKIPNLENELKEADILDDNRSVKDYFTPNGFNYVITQDGIDVYQAIRGGFTKENGEKVQGINEILNLTQQQLRRKPETKNVKLGVLTKLRKQILEYSESTSFLIDQIEDDNDLVDRINKFNVSFFESTEVSPSLFEQIERLYNALKSIKKEEVYIDARNTQKFSQMLFGQWDVIRRGYTVKITEGSKEEKKKYKEYLELDETSKAKRYLNIREIEELVNLVEGFEEVDVFSVLLEKFKMNNIERSEFEAPIYGSPIKLEAIKEYLEKHLEEYHKWKLLLIGNDDLDTDETFYPLLNEVISDYYIIPLYNLTRNYLTRKHSDKDKIKVNFDFPTLADGWSESKISDNRSIILRKGGYYYLGILIDNKLLINKKNKSKKIYEILIYNQIPEFSKSIPNYPFTKKVKEHFKNNVSDFQLIDGYVSPLIITKEIYDIKKEKKYKKDFYKDNNTNKNYLYTIYKWIEFCKQFLYKYKGPNKESYKEMYDFSTLKDTSLYVNLNDFYADVNSCAYRVLFNKIDENTIDNAVEDGKLLLFQIYNKDFSPESKGKKNLHTLYWLSMFSEENLRTRKLKLNGQAEIFYRKKLEKKPIIHKEGSILLNKIDKEGNTIPENIYHECYRYLNKKIGREDLSDEAIALFNKDVLKYKEARFDIIKDRRYSESQFFFHVPITFNWDIKTNKNVNQIVQGMIKDGEIKHIIGIDRGERHLLYYSVIDLEGNIVEQGSLNTLEQNRFDNSTVKVDYQNKLRTREEDRDRARKNWTNINKIKELKDGYLSHVVHKLSRLIIKYEAIVIMENLNQGFKRGRFKVERQVYQKFELALMNKLSALSFKEKYDERKNLEPSGILNPIQACYPVDAYQELQGQNGIVFYLPAAYTSVIDPVTGFTNLFRLKSINSSKYEEFIKKFKNIYFDNEEEDFKFIFNYKDFAKANLVILNNIKSKDWKISTRGERISYNSKKKEYFYVQPTEFLINKLKELNIDYENIDIIPLIDNLEEKAKRKILKALFDTFKYSVQLRNYDFENDYIISPTADDNGNYYNSNEIDIDKTNLPNNGDANGAFNIARKGLLLKDRIVNSNESKVDLKIKNEDWINFIIS

SEQ ID NO: 125 - protein, 1307 aa, synthetic construct
MTQFEGFTNLYQVSKTLRFELIPQGKTLKHIQEQGFIEEDKARNDHYKELKPIIDRIYKTYADQCLQLVQLDWENLSAAIDSYRKEKTEETRNALIEEQATYRNAIHDYFIGRTDNLTDAINKRHAEIYKGLFKAELFNGKVLKQLGTVTTTEHENALLRSFDKFTTYFSGFYENRKNVFSAEDISTAIPHRIVQDNFPKFKENCHIFTRLITAVPSLREHFENVKKAIGIFVSTSIEEVFSFPFYNQLLTQTQIDLYNQLLGGISREAGTEKIKGLNEVLNLAIQKNDETAHIIASLPHRFIPLFKQILSDRNTLSFILEEFKSDEEVIQSFCKYKTLLRNENVLETAEALFNELNSIDLTHIFISHKKLETISSALCDHWDTLRNALYERRISELTGKITKSAKEKVQRSLKHEDINLQEIISAAGKELSEAFKQKTSEILSHAHAALDQPLPTTLKKQEEKEILKSQLDSLLGLYHLLDWFAVDESNEVDPEFSARLTGIKLEMEPSLSFYNKARNYATKKPYSVEKFKLNFQMPTLASGWDVNKEKNNGAILFVKNGLYYLGIMPKQKGRYKALSFEPTEKTSEGFDKMYYDYFPDAAKMIPKCSTQLKAVTAHFQTHTTPILLSNNFIEPLEITKEIYDLNNPEKEPKKFQTAYAKKTGDQKGYREALCKWIDFTRDFLSKYTKTTSIDLSSLRPSSQYKDLGEYYAELNPLLYHISFQRIAEKEIMDAVETGKLYLFQIYNKDFAKGHHGKPNLHTLYWTGLFSPENLAKTSIKLNGQAELFYRPKSRMKRMAHRLGEKMLNKKLKDQKTPIPDTLYQELYDYVNHRLSHDLSDEARALLPNVITKEVSHEIIKDRRFTSDKFFFHVPITLNYQAANSPSKFNQRVNAYLKEHPETPIIGIDRGERNLIYITVIDSTGKILEQRSLNTIQQFDYQKKLDNREKERVAARQAWSVVGTIKDLKQGYLSQVIHEIVDLMIHYQAVVVLENLNFGFKSKRTGIAEKAVYQQFEKMLIDKLNCLVLKDYPAEKVGGVLNPYQLTDQFTSFAKMGTQSGFLFYVPAPYTSKIDPLTGFVDPFVWKTIKNHESRKHFLEGFDFLHYDVKTGDFILHFKMNRNLSFQRGLPGFMPAWDIVFEKNETQFDAKGTPFIAGKRIVPVIENHRFTGRYRDLYPANELIALLEEKGIVFRDGSNILPKLLENDDSHAIDTMVALIRSVLQMRNSNAATGEDYINSPVRDLNGVCFDSRFQNPEWPMDADANGAYHIALKGQLLLNHLKESKDLKLQNGISNQDWLAYIQELRN

SEQ ID NO: 126 - protein, 1307 aa, synthetic construct
MSIYQEFVNKYSLSKTLRFELIPQGKTLENIKARGLILDDEKRAKDYKKAKQIIDKYHQFFIEEILSSVCISEDLLQNYSDVYFKLKKSDDDNLQKDFKSAKDTIKKQISKYINDSEKFKNLFNQNLIDAKKGQESDLILWLKQSKDNGIELFKANSDITDIDEALEIIKSFKGWTTYFKGFHENRKNVYSSNDIPTSIIYRIVDDNLPKFLENKAKYESLKDKAPEAINYEQIKKDLAEELTFDIDYKTSEVNQRVFSLDEVFEIANFNNYLNQSGITKFNTIIGGKFVNGENTKRKGINEYINLYSQQINDKTLKKYKMSVLFKQILSDTESKSFVIDKLEDDSDVVTTMQSFYEQIAAFKTVEEKSIKETLSLLFDDLKAQKLDLSKIYFKNDKSLTDLSQQVFDDYSVIGTAVLEYITQQVAPKNLDNPSKKEQDLIAKKTEKAKYLSLETIKLALEEFNKHRDIDKQCRFEEILSNFAAIPMIFDEIAQNKDNLAQISIKYQNQGKKDLLQASAEEDVKAIKDLLDQTNNLLHRLKIFHISQSEDKANILDKDEHFYLVFEECYFELANIVPLYNKIRNYITQKPYSDEKFKLNFENSTLASGWDKNKESANTAILFIKDDKYYLGIMDKKHNKIFSDKAIEENKGEGYKKIVYKQIADASKDIQNLMIIDGKTVCKKGRKDRNGVNRQLLSLKRKHLPENIYRIKETKSYLKNEARFSRKDLYDFIDYYKDRLDYYDFEFELKPSNEYSDFNDFTNHIGSQGYKLTFENISQDYINSLVNEGKLYLFQIYSKDFSAYSKGRPNLHTLYWKALFDERNLQDVVYKLNGEAELFYRKQSIPKKITHPAKETIANKNKDNPKKESVFEYDLIKDKRFTEDKFFFHCPITINFKSSGANKFNDEINLLLKEKANDVHILSIDRGERHLAYYTLVDGKGNIIKQDNFNIIGNDRMKTNYHDKLAAIEKDRDSARKDWKKINNIKEMKEGYLSQVVHEIAKLVIEYNAIVVFEDLNFGFKRGRFKVEKQVYQKLEKMLIEKLNYLVFKDNEFDKTGGVLRAYQLTAPFETFKKMGKQTGIIYYVPAGFTSKICPVTGFVNQLYPKYESVSKSQEFFSKFDKICYNLDKGYFEFSFDYKNFGDKAAKGKWTIASFGSRLINFRNSDKNHNWDTREVYPTKELEKLLKDYSIEYGHGECIKAAICGESDKKFFAKLTSVLNTILQMRNSKTGTELDYLISPVADVNGNFFDSRQAPKNMPQDADANGAYHIGLKGLMLLDRIKNNQEGKKLNLVIKNEEYFEFVQNRNN

SEQ ID NO: 127 - protein, 1305 aa, Eubacterium sp.
  source 1..1305: note = Eubacterium sp. CAG:76
MNKAADNYTGGNYDEFIALSKVQKTLRNELKPTPFTAEHIKQRGIISEDEYRAQQSLELKKIADEYYRNYITHKLNDINNLDFYNLFDAIEEKYKKNDKDNRDKLDLVEKSKRGEIAKMLSADDNFKSMFEAKLITKLLPDYVERNYTGEDKEKALETLALFKGFTTYFKGYFKTRKNMFSGEGGASSICHRIVNVNASIFYDNLKTFMRIQEKAGDEIALIEEELTEKLDGWRLEHIFSRDYYNEVLAQKGIDYYNQICGDINKHMNLYCQQNKFKANIFKMMKIQKQIMGISEKAFEIPPMYQNDEEVYASFNEFISRLEEVKLTDRLINILQNINIYNTAKIYINARYYTNVSSYVYGGWGVIDSAIERYLYNTIAGKGQSKVKKIENAKKDNKFMSVKELDSIVAEYEPDYFNAPYIDDDDNAVKAFGGQGVLGYFNKMSELLADVSLYTIDYNSDDSLIENKESALRIKKQLDDIMSLYHWLQTFIIDEVVEKDNAFYAELEDICCELENVVTLYDRIRNYVTKKPYSTQKFKLNFASPTLAAGWSRSKEFDNNAIILLRNNKYYIAIFNVNNKPDKQIIKGSEEQRLSTDYKKMVYNLLPGPNKMLPKVFIKSDTGKRDYNPSSYILEGYEKNRHIKSSGNFDINYCHDLIDYYKACINKHPEWKNYGFKFKETNQYNDIGQFYKDVEKQGYSISWAYISEEDINKLDEEGKIYLFEIYNKDLSAHSTGRDNLHTMYLKNIFSEDNLKNICIELNGEAELFYRKSSMKSNITHKKDTILVNKTYINETGVRVSLSDEDYMKVYNYYNNNYVIDTENDKNLIDIIEKIGHRKSKIDIVKDKRYTEDKYFLYLPITINYGIEDENVNSKIIEYIAKQDNMNVIGIDRGERNLIYISVIDNKGNIIEQKSFNLVNNYDYKNKLKNMEKTRDNARKNWQEIGKIKDVKSGYLSGVISKIARMVIDYNAIIVMEDLNKGFKRGRFKVERQVYQKFENMLISKLNYLVFKERKADENGGILRGYQLTYIPKSIKNVGKQCGCIFYVPAAYTSKIDPATGFINIFDFKKYSGSGINAKVKDKKEFLMSMNSIRYINECSEEYEKIGHRELFAFSFDYNNFKTYNVSSPVNEWTAYTYGERIKKLYKDGRWLRSEVLNLTENLIKLMEQYNIEYKDGHDIREDISHMDETRNADFICSLFEELKYTVQLRNSKSEAEDENYDRLVSPILNSSNGFYDSSDYMENENNTTHTMPKDADANGAYCIALKGLYEINKIKQNWSDDKKFKENELYINVTEWLDYIQNRRFE

SEQ ID NO: 128 - protein, 1300 aa, Francisella tularensis
MSIYQEFVNKYSLSKTLRFELIPQGKTLENIKARGLILDDEKRAKDYKKAKQIIDKYHQFFIEEILSSVCISEDLLQNYSDVYFKLKKSDDDNLQKDFKSAKDTIKKQISEYIKDSEKFKNLFNQNLIDAKKGQESDLILWLKQSKDNGIELFKANSDITDIDEALEIIKSFKGWTTYFKGFHENRKNVYSSNDIPTSIIYRIVDDNLPKFLENKAKYESLKDKAPEAINYEQIKKDLAEELTFDIDYKTSEVNQRVFSLDEVFEIANFNNYLNQSGITKFNTIIGGKFVNGENTKRKGINEYINLYSQQINDKTLKKYKMSVLFKQILSDTESKSFVIDKLEDDSDVVTTMQSFYEQIAAFKTVEEKSIKETLSLLFDDLKAQKLDLSKIYFKNDKSLTDLSQQVFDDYSVIGTAVLEYITQQVAPKNLDNPSKKEQDLIAKKTEKAKYLSLETIKLALEEFNKHRDIDKQCRFEEILANFAAIPMIFDEIAQNKDNLAQISIKYQNQGKKDLLQASAEDDVKAIKDLLDQTNNLLHRLKIFHISQSEDKANILDKDEHFYLVFEECYFELANIVPLYNKIRNYITQKPYSDEKFKLNFENSTLANGWDKNKEPDNTAILFIKDDKYYLGVMNKKNNKIFDDKAIKENKGEGYKKIVYKLLPGANKMLPKVFFSAKSIKFYNPSEDILRIRNHSTHTKNGNPQKGYEKFEFNIEDCRKFIDFYKESISKHPEWKDFGFRFSDTQRYNSIDEFYREVENQGYKLTFENISESYIDSVVNQGKLYLFQIYNKDFSAYSKGRPNLHTLYWKALFDERNLQDVVYKLNGEAELFYRKKSIPKKITHPAKEAIANKNKDNPKKESFFEYDLIKDKRFTEDKFFFHCPITINFKSSGANKFNDEINLLLKEKANDVHILSIDRGERHLAYYTLVDGKGNIIKQDTFNIIGNDRMKTNYHDKLAAIEKDRDSARKDWKKINNIKEMKEGYLSQVVHEIAKLVIEHNAIVVFEDLNFGFKRGRFKVEKQVYQKLEKMLIEKLNYLVFKDNEFDKTGGVLRAYQLTAPFETFKKMGKQTGIIYYVPAGFTSKICPVTGFVNQLYPKYESVSKSQEFFSKFDKICYNLDKGYFEFSFDYKNFGDKAAKGKWTIASFGSRLINFRNSDKNHNWDTREVYPTKELEKLLKDYSIEYGHGECIKAAICGESDKKFFAKLTSILNTILQMRNSKTGTELDYLISPVADVNGNFFDSRQAPKNMPQDADANGAYHIGLKGLMLLDRIKNNQEGKKLNLVIKNEEYFEFVQNRNN

SEQ ID NO: 129 - protein, 1300 aa, Francisella tularensis
MSIYQEFVNKYSLSKTLRFELIPQGKTLENIKARGLILDDEKRAKDYKKAKQIIDKYHQFFIEEILSSVCISEDLLQNYSDVYFKLKKSDDDNLQKDFKSAKDTIKKQISEYIKDSEKFKNLFNQNLIDAKKGQESDLILWLKQSKDNGIELFKANSDITDIDEALEIIKSFKGWTTYFKGFHENRKNVYSSDDIPTSIIYRIVDDNLPKFLENKAKYESLKDKAPEAINYEQIKKDLAEELTFDIDYKTSEVNQRVFSLDEVFEIANFNNYLNQSGITKFNTIIGGKFVNGENTKRKGINEYINLYSQQINDKTLKKYKMSVLFKQILSDTESKSFVIDKLEDDSDVVTTMQSFYEQIAAFKTVEEKSIKETLSLLFDDLKAQKLDLSKIYFKNDKSLTDLSQQVFDDYSVIGTAVLEYITQQVAPKNLDNPSKKEQDLIAKKTEKAKYLSLETIKLALEEFNKHRDIDKQCRFEEILANFAAIPMIFDEIAQNKDNLAQISLKYQNQGKKDLLQASAEEDVKAIKDLLDQTNNLLHRLKIFHISQSEDKANILDKDEHFYLVFEECYFELANIVPLYNKIRNYITQKPYSDEKFKLNFENSTLANGWDKNKEPDNTAILFIKDDKYYLGVMNKKNNKIFDDKAIKENKGEGYKKIVYKLLPGANKMLPKVFFSAKSIKFYNPSEDILRIRNHSTHTKNGNPQKGYEKFEFNIEDCRKFIDFYKESISKHPEWKDFGFRFSDTQRYNSIDEFYREVENQGYKLTFENISESYIDSVVNQGKLYLFQIYNKDFSAYSKGRPNLHTLYWKALFDERNLQDVVYKLNGEAELFYRKQSIPKKITHPAKEAIANKNKDNPKKESVFEYDLIKDKRFTEDKFFFHCPITINFKSSGANKFNDEINLLLKEKANDVHILSIDRGERHLAYYTLVDGKGNIIKQDTFNIIGNDRMKTNYHDKLAAIEKDRDSARKDWKKINNIKEMKEGYLSQVVHEIAKLVIEHNAIVVFEDLNFGFKRGRFKVEKQVYQKLEKMLIEKLNYLVFKDNEFDKTGGVLRAYQLTAPFETFKKMGKQTGIIYYVPAGFTSKICPVTGFVNQLYPKYESVSKSQEFFSKFDKICYNLDKGYFEFSFDYKNFGDKAAKGKWTIASFGSRLINFRNSDKNHNWDTREVYPTKELEKLLKDYSIEYGHGECIKAAICGESDKKFFAKLTSVLNTILQMRNSKTGTELDYLISPVADVNGNFFDSRQAPKNMPQDADANGAYHIGLKGLMLLDRIKNNQEGKKLNLVIKNEEYFEFVQNRNN

SEQ ID NO: 130 - protein, 1300 aa, Francisella tularensis
MSIYQEFVNKYSLSKTLRFELIPQGKTLENIKARGLILDDEKRAKDYKKAKQIIDKYHQFFIEEILSSVCISEDLLQNYSDVYFKLKKSDDDNLQKDFKSAKDTIKKQISEYIKDSEKFKNLFNQNLIDAKKGQESDLILWLKQSKDNGIELFKANSDITDIDEALEIIKSFKGWTTYFKGFHENRKNVYSSNDIPTSIIYRIVDDNLPKFLENKAKYESLKDKAPEAINYEQIKKDLAEELTFDIDYKTSEVNQRVFSLDEVFEIANFNNYLNQSGITKFNTIIGGKFVNGENTKRKGINEYINLYSQQINDKTLKKYKMSVLFKQILSDTESKSFVIDKLEDDSDVVTTMQSFYEQIAAFKTVEEKSIKETLSLLFDDLKAQKLDLSKIYFKNDKSLTDLSQQVFDDYSVIGTAVLEYITQQIAPKNLDNPSKKEQELIAKKTEKAKYLSLETIKLALEEFNKHRDIDKQCRFEEILANFAAIPMIFDEIAQNKDNLAQISIKYQNQGKKDLLQASAEDDVKAIKDLLDQTNNLLHKLKIFHISQSEDKANILDKDEHFYLVFEECYFELANIVPLYNKIRNYITQKPYSDEKFKLNFENSTLANGWDKNKEPDNTAILFIKDDKYYLGVMNKKNNKIFDDKAIKENKGEGYKKIVYKLLPGANKMLPKVFFSAKSIKFYNPSEDILRIRNHSTHTKNGSPQKGYEKFEFNIEDCRKFIDFYKQSISKHPEWKDFGFRFSDTQRYNSIDEFYREVENQGYKLTFENISESYIDSVVNQGKLYLFQIYNKDFSAYSKGRPNLHTLYWKALFDERNLQDVVYKLNGEAELFYRKQSIPKKITHPAKEAIANKNKDNPKKESVFEYDLIKDKRFTEDKFFFHCPITINFKSSGANKFNDEINLLLKEKANDVHILSIDRGERHLAYYTLVDGKGNIIKQDTFNIIGNDRMKTNYHDKLAAIEKDRDSARKDWKKINNIKEMKEGYLSQVVHEIAKLVIEYNAIVVFEDLNFGFKRGRFKVEKQVYQKLEKMLIEKLNYLVFKDNEFDKTGGVLRAYQLTAPFETFKKMGKQTGIIYYVPAGFTSKICPVTGFVNQLYPKYESVSKSQEFFSKFDKICYNLDKGYFEFSFDYKNFGDKAAKGKWTIASFGSRLINFRNSDKNHNWDTREVYPTKELEKLLKDYSIEYGHGECIKAAICGESDKKFFAKLTSVLNTILQMRNSKTGTELDYLISPVADVNGNFFDSRQAPKNMPQDADANGAYHIGLKGLMLLGRIKNNQEGKKLNLVIKNEEYFEFVQNRNN

SEQ ID NO: 131 - protein, 1285 aa, unidentified
  source 1..1285: note = Candidatus Roizmanbacteria bacterium GW2011_GWA2_37_7
MKSFDSFTNLYSLSKTLKFEMRPVGNTQKMLDNAGVFEKDKLIQKKYGKTKPYFDRLHREFIEEALTGVELIGLDENFRTLVDWQKDKKNNVAMKAYENSLQRLRTEIGKIFNLKAEDWVKNKYPILGLKNKNTDILFEEAVFGILKARYGEEKDTFIEVEEIDKTGKSKINQISIFDSWKGFTGYFKKFFETRKNFYKNDGTSTAIATRIIDQNLKRFIDNLSIVESVRQKVDLAETEKSFSISLSQFFSIDFYNKCLLQDGIDYYNKIIGGETLKNGEKLIGLNELINQYRQNNKDQKIPFFKLLDKQILSEKILFLDEIKNDTELIEALSQFAKTAEEKTKIVKKLFADFVENNSKYDLAQIYISQEAFNTISNKWTSETETFAKYLFEAMKSGKLAKYEKKDNSYKFPDFIALSQMKSALLSISLEGHFWKEKYYKISKFQEKTNWEQFLAIFLYEFNSLFSDKINTKDGETKQVGYYLFAKDLHNLILSEQIDIPKDSKVTIKDFADSVLTIYQMAKYFAVEKKRAWLAEYELDSFYTQPDTGYLQFYDNAYEDIVQVYNKLRNYLTKKPYSEEKWKLNFENSTLANGWDKNKESDNSAVILQKGGKYYLGLITKGHNKIFDDRFQEKFIVGIEGGKYEKIVYKFFPDQAKMFPKVCFSAKGLEFFRPSEEILRIYNNAEFKKGETYSIDSMQKLIDFYKDCLTKYEGWACYTFRHLKPTEEYQNNIGEFFRDVAEDGYRIDFQGISDQYIHEKNEKGELHLFEIHNKDWNLDKARDGKSKTTQKNLHTLYFESLFSNDNVVQNFPIKLNGQAEIFYRPKTEKDKLESKKDKKGNKVIDHKRYSENKIFFHVPLTLNRTKNDSYRFNAQINNFLANNKDINIIGVDRGEKHLVYYSVITQASDILESGSLNELNGVNYAEKLGKKAENREQARRDWQDVQGIKDLKKGYISQVVRKLADLAIKHNAIIILEDLNMRFKQVRGGIEKSIYQQLEKALIDKLSFLVDKGEKNPEQAGHLLKAYQLSAPFETFQKMGKQTGIIFYTQASYTSKSDPVTGWRPHLYLKYFSAKKAKDDIAKFTKIEFVNDRFELTYDIKDFQQAKEYPNKTVWKVCSNVERFRWDKNLNQNKGGYTHYTNITENIQELFTKYGIDITKDLLTQISTIDEKQNTSFFRDFIFYFNLICQIRNTDDSEIAKKNGKDDFILSPVEPFFDSRKDNGNKLPENGDDNGAYNIARKGIVILNKISQYSEKNENCEKMKWGDLYVSNIDWDNFVTQANARH

SEQ ID NO: 132 - protein, 1282 aa, Eubacterium eligens
MNGNRSIVYREFVGVTPVAKTLRNELRPVGHTQEHIIQNGLIQEDELRQEKSTELKNIMDDYYREYIDKSLSGLTDLDFTLLFELMNSVQSSLSKDNKKALEKEHNKMREQICTHLQSDSDYKNMFNAKLFKEILPDFIKNYNQYDVKDKAGKLETLALFNGFSTYFTDFFEKRKNVFTKEAVSTSIAYRIVHENSLIFLANMTSYKKISEKALDEIEVIEKNNQDKMGDWELNQIFNPDFYNMVLIQSGIDFYNEICGVVNAHMNLYCQQTKNNYNLFKMRKLHKQILAYTSTSFEVPKMFEDDMSVYNAVNAFIDETEKGNIIGKLKDIVNKYDELDEKRIYISKDFYETLSCFMSGNWNLITGCVENFYDENIHAKGKSKEEKVKKAVKEDKYKSINDVNDLVEKYIDEKERNEFKNSNAKQYIREISNIITDTETAHLEYDEHISLIESEEKADEIKKRLDMYMNMYHWVKAFIVDEVLDRDEMFYSDIDDIYNILENIVPLYNRVRNYVTQKPYTSKKIKLNFQSPTLANGWSQSKEFDNNAIILIRDNKYYLAIFNAKNKPDKKIIQGNSDKKNDNDYKKMVYNLLPGANKMLPKVFLSKKGIETFKPSDYIISGYNAHKHIKTSENFDISFCRDLIDYFKNSIEKHAEWRKYEFKFSATDSYNDISEFYREVEMQGYRIDWTYISEADINKLDEEGKIYLFQIYNKDFAENSTGKENLHTMYFKNIFSEENLKNIVIKLNGQAELFYRKASVKNPVKHKKDSVLVNKTYKNQLDNGDVVRIPIPDDIYNEIYKMYNGYIKESDLSEAAKEYLDKVEVRTAQKDIVKDYRYTVDKYFIHTPITINYKVTARNNVNDMAVKYIAQNDDIHVIGIDRGERNLIYISVIDSHGNIVKQKSYNILNNYDYKKKLVEKEKTREYARKNWKSIGNIKELKEGYISGVVHEIAMLMVEYNAIIAMEDLNYGFKRGRFKVERQVYQKFESMLINKLNYFASKGKSVDEPGGLLKGYQLTYVPDNIKNLGKQCGVIFYVPAAFTSKIDPSTGFISAFNFKSISTNASRKQFFMQFDEIRYCAEKDMFSFGFDYNNFDTYNITMGKTQWTVYTNGERLQSEFNNARRTGKTKSINLTETIKLLLEDNEINYADGHDVRIDMEKMYEDKNSEFFAQLLSLYKLTVQMRNSYTEAEEQEKGISYDKIISPVINDEGEFFDSDNYKESDDKECKMPKDADANGAYCIALKGLYEVLKIKSEWTEDGFDRNCLKLPHAEWLDFIQNKRYE

SEQ ID NO: 133 - protein, 508 aa, Eubacterium ramulus
MIKKTIDTVLNVRPIFVGIQHLYFYEGPCRFGEGDELMPEYDAMMNQEMNAAYVNEVVQHETEGVHIMDPIYVERDDWFRSPEAMYEKMAEDIDKVDFYLFHFGIGRGDIYLEFAERYKKPVGAAPGLCCDGIGNTAAVKNRGLEAYAFMSWDEFDTWMRVLRVRKCLKNTRVLLAVRWDSNRSYSSYDNFINQSDVTNKWGIQFRHVNVHELLDQTHPVDPTTNPSTPGRKALNINDEDMKEIEKITDELIANAEACTMEPDMVKKTIQAYYTVQKLLDAYDCNAFTAPCPDLCSTRRFSEEKFTLCMTHSLNDENGISSACEYDINSVIGKVIMTNLSGKAPYMGNTNAIVFDKEGHMIPFHKFNDNTIEDIADKTNLYMTFHSTPNRNLKGLKAEKERYRLAPFAYSGFGATIRYDFAQDIGQVITMIRISPDATKIFIAKGTISGGAGYEMKNCDQGVFFNVADKVDFYHKQQYFGNHTVLAYGDYVEELKMLAEALGIEAVIA

SEQ ID NO: 134 - protein, 1273 aa, Flavobacterium sp.
  source 1..1273: note = Flavobacterium sp. 316
MKNFSNLYQVSKTVRFELKPIGNTLENIKNKSLLKNDSIRAESYQKMKKTIDEFHKYFIDLALNNKKLSYLNEYIALYTQSAEAKKEDKFKADFKKVQDNLRKEIVSSFTEGEAKAIFSVLDKKELITIELEKWKNENNLAVYLDESFKSFTTYFTGFHQNRKNMYSAEANSTAIAYRLIHENLPKFIENSKAFEKSSQIAELQPKIEKLYKEFEAYLNVNSISELFEIDYFNEVLTQKGITVYNNIIGGRTATEGKQKIQGLNEIINLYNQTKPKNERLPKLKQLYKQILSDRISLSFLPDAFTEGKQVLKAVFEFYKINLLSYKQDGVEESQNLLELIQQVVKNLGNQDVNKIYLKNDTSLTTIAQQLFGDFSVFSAALQYRYETVVNPKYTAEYQKANEAKQEKLDKEKIKFVKQDYFSIAFLQEVVADYVKTLDENLDWKQKYTPSCIADYFTTHFIAKKENEADKTFNFIANIKAKYQCIQGILEQADDYEDELKQDQKLIDNIKFFLDAILEVVHFIKPLHLKSESITEKDNAFYDVFENYYEALNVVTPLYNMVRNYVTQKPYSTEKIKLNFENAQLLNGWDANKEKDYLTTILKRDGNYFLAIMDKKHNKTFQQFTEDDENYEKIVYKLLPGVNKMLPKVFFSNKNIAFFNPSKEILDNYKNNTHKKGATFNLKDCHALIDFFKDSLNKHEDWKYFDFQFSETKTYQDLSGFYKEVEHQGYKINFKKVSVSQIDTLIEEGKMYLFQIYNKDFSPYAKGKPNMHTLYWKALFETQNLENVIYKLNGQAEIFFRKASIKKKNIITHKAHQPIAAKNPLTPTAKNTFAYDLIKDKRYTVDKFQFHVPITMNFKATGNSYINQDVLAYLKDNPEVNIIGLDRGERHLVYLTLIDQKGTILLQESLNVIQDEKTHTPYHTLLDNKEIARDKARKNWGSIESIKELKEGYISQVVHKITKMMIEHNAIVVMEDLNFGFKRGRFKVEKQIYQKLEKMLIDKLNYLVLKDKQPHELGGLYNALQLTNKFESFQKMGKQSGFLFYVPAWNTSKIDPTTGFVNYFYTKYENVEKAKTFFSKFDSILYNKTKGYFEFVVKNYSDFNPKAADTRQEWTICTHGERIETKRQKEQNNNFVSTTIQLTEQFVNFFEKVGLDLSKELKTQLIAQNEKSFFEELFHLLKLTLQMRNSESHTEIDYLISPVANEKGIFYDSRKATASLPIDADANGAYHIAKKGLWIMEQINKTNSEDDLKKVKLAISNREWLQYVQQVQKK

SEQ ID NO: 135 - protein, 1264 aa, Prevotella brevis
MKQFTNLYQLSKTLRFELKPIGKTLEHINANGFIDNDAHRAESYKKVKKLIDDYHKDYIENVLNNFKLNGEYLQAYFDLYSQDTKDKQFKDIQDKLRKSIASALKGDDRYKTIDKKELIRQDMKTFLKKDTDKALLDEFYEFTTYFTGYHENRKNMYSDEAKSTAIAYRLIHDNLPKFIDNIAVFKKIANTSVADNFSTIYKNFEEYLNVNSIDEIFSLDYYNIVLTQTQIEVYNSIIGGRTLEDDTKIQGINEFVNLYNQQLANKKDRLPKLKPLFKQILSDRVQLSWLQEEFNTGADVLNAVKEYCTSYFDNVEESVKVLLTGISDYDLSKIYITNDLALTDVSQRMFGEWSIIPNAIEQRLRSDNPKKTNEKEEKYSDRISKLKKLPKSYSLGYINECISELNGIDIADYYATLGAINTESKQEPSIPTSIQVHYNALKPILDTDYPREKNLSQDKLTVMQLKDLLDDFKALQHFIKPLLGNGDEAEKDEKFYGELMQLWEVIDSITPLYNKVRNYCTRKPFSTEKIKVNFENAQLLDGWDENKESTNASIILRKNGMYYLGIMKKEYRNILTKPMPSDGDCYDKVVYKFFKDITTMVPKCTTQMKSVKEHFSNSNDDYTLFEKDKFIAPVVITKEIFDLNNVLYNGVKKFQIGYLNNTGDSFGYNHAVEIWKSFCLKFLKAYKSTSIYDFSSIEKNIGCYNDLNSFYGAVNLLLYNLTYRKVSVDYIHQLVDEDKMYLFMIYNKDFSTYSKGTPNMHTLYWKMLFDESNLNDVVYKLNGQAEVFYRKKSITYQHPTHPANKPIDNKNVNNPKKQSNFEYDLIKDKRYTVDKFMFHVPITLNFKGMGNGDINMQVREYIKTTDDLHFIGIDRGERHLLYICVINGKGEIVEQYSLNEIVNNYKGTEYKTDYHTLLSERDKKRKEERSSWQTIEGIKELKSGYLSQVIHKITQLMIKYNAIVLLEDLNMGFKRGRQKVESSVYQQFEKALIDKLNYLVDKNKDANEIGGLLHAYQLTNDPKLPNKNSKQSGFLFYVPAWNTSKIDPVTGFVNLLDTRYENVAKAQAFFKKFDSIRYNKEYDRFEFKFDYSNFTAKAEDTRTQWTLCTYGTRIETFRNAEKNSNWDSREIDLTTEWKTLFTQHNIPLNANLKEAILLQANKNFYTDILHLMKLTLQMRNSVTGTDIDYMVSPVANECGEFFDSRKVKEGLPVNADANGAYNIARKGLWLAQQIKNANDLSDVKLAITNKEWLQFAQKKQYLKD

SEQ ID NO: 136 - protein, 1264 aa, Moraxella caprae
MLFQDFTHLYPLSKTMRFELKPIGKTLEHIHAKNFLSQDETMADMYQKVKAILDDYHRDFIADMMGEVKLTKLAEFYDVYLKFRKNPKDDGLQKQLKDLQAVLRKEIVKPIGNGGKYKAGYDRLFGAKLFKDGKELGDLAKFVIAQEGESSPKLAHLAHFEKFSTYFTGFHDNRKNMYSDEDKHTAITYRLIHENLPRFIDNLQILATIKQKHSALYDQIINELTASGLDVSLASHLDGYHKLLTQEGITAYNTLLGGISGEAGSRKIQGINELINSHHNQHCHKSERIAKLRPLHKQILSDGMGVSFLPSKFADDSEMCQAVNEFYRHYADVFAKVQSLFDGFDDHQKDGIYVEHKNLNELSKQAFGDFALLGRVLDGYYVDVVNPEFNERFAKAKTDNAKAKLTKEKDKFIKGVHSLASLEQAIEHYTARHDDESVQAGKLGQYFKHGLAGVDNPIQKIHNNHSTIKGFLERERPAGERALPKIKSGKNPEMTQLRQLKELLDNALNVAHFAKLLTTKTTLDNQDGNFYGEFGALYDELAKIPTLYNKVRDYLSQKPFSTEKYKLNFGNPTLLNGWDLNKEKDNFGIILQKDGCYYLALLDKAHKKVFDNAPNTGKNVYQKMIYKLLPGPNKMLPKVFFAKSNLDYYNPSAELLDKYAQGTHKKGNNFNLKDCHALIDFFKAGINKHPEWQHFGFKFSPTSSYQDLSDFYREVEPQGYQVKFVDINADYINELVEQGQLYLFQIYNKDFSPKAHGKPNLHTLYFKALFSKDNLANPIYKLNGEAQIFYRKASLDMNETTIHRAGEVLENKNPDNPKKRQFVYDIIKDKRYTQDKFMLHVPITMNFGVQGMTIKEFNKKVNQSIQQYDEVNVIGIDRGERHLLYLTVINSKGEILEQRSLNDITTASANGTQMTTPYHKILDKREIERLNARVGWGEIETIKELKSGYLSHVVHQISQLMLKYNAIVVLEDLNFGFKRGRFKVEKQIYQNFENALIKKLNHLVLKDEADDEIGSYKNALQLTNNFTDLKSIGKQTGFLFYVPAWNTSKIDPETGFVDLLKPRYENIAQSQAFFGKFDKICYNADKDYFEFHIDYAKFTDKAKNSRQIWKICSHGDKRYVYDKTANQNKGATKGINVNDELKSLFARHHINDKQPNLVMDICQNNDKEFHKSLIYLLKTLLALRYSNASSDEDFILSPVANDEGMFFNSALADDTQPQNADANGAYHIALKGLWVLEQIKNSDDLNKVKLAIDNQTWLNFAQNR

SEQ ID NO: 137 - protein, 1263 aa, Leptospira inadai
MEDYSGFVNIYSIQKTLRFELKPVGKTLEHIEKKGFLKKDKIRAEDYKAVKKIIDKYHRAYIEEVFDSVLHQKKKKDKTRFSTQFIKEIKEFSELYYKTEKNIPDKERLEALSEKLRKMLVGAFKGEFSEEVAEKYKNLFSKELIRNEIEKFCETDEERKQVSNFKSFTTYFTGFHSNRQNIYSDEKKSTAIGYRIIHQNLPKFLDNLKIIESIQRRFKDFPWSDLKKNLKKIDKNIKLTEYFSIDGFVNVLNQKGIDAYNTILGGKSEESGEKIQGLNEYINLYRQKNNIDRKNLPNVKILFKQILGDRETKSFIPEAFPDDQSVLNSITEFAKYLKLDKKKKSIIAELKKFLSSFNRYELDGIYLANDNSLASISTFLFDDWSFIKKSVSFKYDESVGDPKKKIKSPLKYEKEKEKWLKQKYYTISFLNDAIESYSKSQDEKRVKIRLEAYFAEFKSKDDAKKQFDLLERIEEAYAIVEPLLGAEYPRDRNLKADKKEVGKIKDFLDSIKSLQFFLKPLLSAEIFDEKDLGFYNQLEGYYEEIDSIGHLYNKVRNYLTGKIYSKEKFKLNFENSTLLKGWDENREVANLCVIFREDQKYYLGVMDKENNTILSDIPKVKPNELFYEKMVYKLIPTPHMQLPRIIFSSDNLSIYNPSKSILKIREAKSFKEGKNFKLKDCHKFIDFYKESISKNEDWSRFDFKFSKTSSYENISEFYREVERQGYNLDFKKVSKFYIDSLVEDGKLYLFQIYNKDFSIFSKGKPNLHTIYFRSLFSKENLKDVCLKLNGEAEMFFRKKSINYDEKKKREGHHPELFEKLKYPILKDKRYSEDKFQFHLPISLNFKSKERLNFNLKVNEFLKRNKDINIIGIDRGERNLLYLVMINQKGEILKQTLLDSMQSGKGRPEINYKEKLQEKEIERDKARKSWGTVENIKELKEGYLSIVIHQISKLMVENNAIVVLEDLNIGFKRGRQKVERQVYQKFEKMLIDKLNFLVFKENKPTEPGGVLKAYQLTDEFQSFEKLSKQTGFLFYVPSWNTSKIDPRTGFIDFLHPAYENIEKAKQWINKFDSIRFNSKMDWFEFTADTRKFSENLMLGKNRVWVICTTNVERYFTSKTANSSIQYNSIQITEKLKELFVDIPFSNGQDLKPEILRKNDAVFFKSLLFYIKTTLSLRQNNGKKGEEEKDFILSPVVDSKGRFFNSLEASDDEPKDADANGAYHIALKGLMNLLVLNETKEENLSRPKWKIKNKDWLEFVWERNR

SEQ ID NO: 138 - protein, 1262 aa, Porphyromonas crevioricanis
MPWIDLKDFTNLYPVSKTLRFELKPVGKTLENIEKAGILKEDEHRAESYRRVKKIIDTYHKVFIDSSLENMAKMGIENEIKAMLQSFCELYKKDHRTEGEDKALDKIRAVLRGLIVGAFTGVCGRRENTVQNEKYESLFKEKLIKEILPDFVLSTEAESLPFSVEEATRSLKEFDSFTSYFAGFYENRKNIYSTKPQSTAIAYRLIHENLPKFIDNILVFQKIKEPIAKELEHIRADFSAGGYIKKDERLEDIFSLNYYIHVLSQAGIEKYNALIGKIVTEGDGEMKGLNEHINLYNQQRGREDRLPLFRPLYKQILSDREQLSYLPESFEKDEELLRALKEFYDHIAEDILGRTQQLMTSISEYDLSRIYVRNDSQLTDISKKMLGDWNAIYMARERAYDHEQAPKRITAKYERDRIKALKGEESISLANLNSCIAFLDNVRDCRVDTYLSTLGQKEGPHGLSNLVENVFASYHEAEQLLSFPYPEENNLIQDKDNVVLIKNLLDNISDLQRFLKPLWGMGDEPDKDERFYGEYNYIRGALDQVIPLYNKVRNYLTRKPYSTRKVKLNFGNSQLLSGWDRNKEKDNSCVILRKGQNFYLAIMNNRHKRSFENKVLPEYKEGEPYFEKMDYKFLPDPNKMLPKVFLSKKGIEIYEPSPKLLEQYGHGTHKKGDTFSMDDLHELIDFFKHSIEAHEDWKQFGFKFSDTATYENVSSFYREVEDQGYKLSFRKVSESYVYSLIDQGKLYLFQIYNKDFSPCSKGTPNLHTLYWRMLFDERNLADVIYKLDGKAEIFFREKSLKNDHPTHPAGKPIKKKSRQKKGEESLFEYDLVKDRRYTMDKFQFHVPITMNFKCSAGSKVNDMVNAHIREAKDMHVIGIDRGERNLLYICVIDSRGTILDQISLNTINDIDYHDLLESRDKDRQQERRNWQTIEGIKELKQGYLSQAVHRIAELMVAYKAVVALEDLNMGFKRGRQKVESSVYQQFEKQLIDKLNYLVDKKKRPEDIGGLLRAYQFTAPFKSFKEMGKQNGFLFYIPAWNTSNIDPTTGFVNLFHAQYENVDKAKSFFQKFDSISYNPKKDWFEFAFDYKNFTKKAEGSRSMWILCTHGSRIKNFRNSQKNGQWDSEEFALTEAFKSLFVRYEIDYTADLKTAIVDEKQKDFFVDLLKLFKLTVQMRNSWKEKDLDYLISPVAGADGRFFDTREGNKSLPKDADANGAYNIALKGLWALRQIRQTSEGGKLKLAISNKEWLQFVQERSYEKD

SEQ ID NO: 139 - protein, 1262 aa, unidentified
  source 1..1262: note = Bacteroidetes oral taxon 274
MRKFNEFVGLYPISKTLRFELKPIGKTLEHIQRNKLLEHDAVRADDYVKVKKIIDKYHKCLIDEALSGFTFDTEADGRSNNSLSEYYLYYNLKKRNEQEQKTFKTIQNNLRKQIVNKLTQSEKYKRIDKKELITTDLPDFLTNESEKELVEKFKNFTTYFTEFHKNRKNMYSKEEKSTAIAFRLINENLPKFVDNIAAFEKVVSSPLAEKINALYEDFKEYLNVEEISRVFRLDYYDELLTQKQIDLYNAIVGGRTEEDNKIQIKGLNQYINEYNQQQTDRSNRLPKLKPLYKQILSDRESVSWLPPKFDSDKNLLIKIKECYDALSEKEKVFDKLESILKSLSTYDLSKIYISNDSQLSYISQKMFGRWDIISKAIREDCAKRNPQKSRESLEKFAERIDKKLKTIDSISIGDVDECLAQLGETYVKRVEDYFVAMGESEIDDEQTDTTSFKKNIEGAYESVKELLNNADNITDNNLMQDKGNVEKIKTLLDAIKDLQRFIKPLLGKGDEADKDGVFYGEFTSLWTKLDQVTPLYNMVRNYLTSKPYSTKKIKLNFENSTLMDGWDLNKEPDNTTVIFCKDGLYYLGIMGKKYNRVFVDREDLPHDGECYDKMEYKLLPGANKMLPKVFFSETGIQRFLPSEELLGKYERGTHKKGAGFDLGDCRALIDFFKKSIERHDDWKKFDFKFSDTSTYQDISEFYREVEQQGYKMSFRKVSVDYIKSLVEEGKLYLFQIYNKDFSAHSKGTPNMHTLYWKMLFDEENLKDVVYKLNGEAEVFFRKSSITVQSPTHPANSPIKNKNKDNQKKESKFEYDLIKDRRYTVDKFLFHVPITMNFKSVGGSNINQLVKRHIRSATDLHIIGIDRGERHLLYLTVIDSRGNIKEQFSLNEIVNEYNGNTYRTDYHELLDTREGERTEARRNWQTIQNIRELKEGYLSQVIHKISELAIKYNAVIVLEDLNFGFMRSRQKVEKQVYQKFEKMLIDKLNYLVDKKKPVAETGGLLRAYQLTGEFESFKTLGKQSGILFYVPAWNTSKIDPVTGFVNLFDTHYENIEKAKVFFDKFKSIRYNSDKDWFEFVVDDYTRFSPKAEGTRRDWTICTQGKRIQICRNHQRNNEWEGQEIDLTKAFKEHFEAYGVDISKDLREQINTQNKKEFFEELLRLLRLTLQMRNSMPSSDIDYLISPVANDTGCFFDSRKQAELKENAVLPMNADANGAYNIARKGLLAIRKMKQEENDSAKISLAISNKEWLKFAQTKPYLED

SEQ ID NO: 140 - protein, 1260 aa, Porphyromonas crevioricanis
MDSLKDFTNLYPVSKTLRFELKPVGKTLENIEKAGILKEDEHRAESYRRVKKIIDTYHKVFIDSSLENMAKMGIENEIKAMLQSFCELYKKDHRTEGEDKALDKIRAVLRGLIVGAFTGVCGRRENTVQNEKYESLFKEKLIKEILPDFVLSTEAESLPFSVEEATRSLKEFDSFTSYFAGFYENRKNIYSTKPQSTAIAYRLIHENLPKFIDNILVFQKIKEPIAKELEHIRADFSAGGYIKKDERLEDIFSLNYYIHVLSQAGIEKYNALIGKIVTEGDGEMKGLNEHINLYNQQRGREDRLPLFRPLYKQILSDREQLSYLPESFEKDEELLRALKEFYDHIAEDILGRTQQLMTSISEYDLSRIYVRNDSQLTDISKKMLGDWNAIYMARERAYDHEQAPKRITAKYERDRIKALKGEESISLANLNSCIAFLDNVRDCRVDTYLSTLGQKEGPHGLSNLVENVFASYHEAEQLLSFPYPEENNLIQDKDNVVLIKNLLDNISDLQRFLKPLWGMGDEPDKDERFYGEYNYIRGALDQVIPLYNKVRNYLTRKPYSTRKVKLNFGNSQLLSGWDRNKEKDNSCVILRKGQNFYLAIMNNRHKRSFENKMLPEYKEGEPYFEKMDYKFLPDPNKMLPKVFLSKKGIEIYKPSPKLLEQYGHGTHKKGDTFSMDDLHELIDFFKHSIEAHEDWKQFGFKFSDTATYENVSSFYREVEDQGYKLSFRKVSESYVYSLIDQGKLYLFQIYNKDFSPCSKGTPNLHTLYWRMLFDERNLADVIYKLDGKAEIFFREKSLKNDHPTHPAGKPIKKKSRQKKGEESLFEYDLVKDRRYTMDKFQFHVPITMNFKCSAGSKVNDMVNAHIREAKDMHVIGIDRGERNLLYICVIDSRGTILDQISLNTINDIDYHDLLESRDKDRQQEHRNWQTIEGIKELKQGYLSQAVHRIAELMVAYKAVVALEDLNMGFKRGRQKVESSVYQQFEKQLIDKLNYLVDKKKRPEDIGGLLRAYQFTAPFKSFKEMGKQNGFLFYIPAWNTSNIDPTTGFVNLFHVQYENVDKAKSFFQKFDSISYNPKKDWFEFAFDYKNFTKKAEGSRSMWILCTHGSRIKNFRNSQKNGQWDSEEFALTEAFKSLFVRYEIDYTADLKTAIVDEKQKDFFVDLLKLFKLTVQMRNSWKEKDLDYLISPVAGADGRFFDTREGNKSLPKDADANGAYNIALKGLWALRQIRQTSEGGKLKLAISNKEWLQFVQERSYEKD

SEQ ID NO: 141 - protein, 1260 aa, Porphyromonas crevioricanis
MDSLKDFTNLYPVSKTLRFELKPVGKTLENIEKAGILKEDEHRAESYRRVKKIIDTYHKVFIDSSLENMAKMGIENEIKAMLQSFCELYKKDHRTEGEDKALDKIRAVLRGLIVGAFTGVCGRRENTVQNEKYESLFKEKLIKEILPDFVLSTEAESLPFSVEEATRSLKEFDSFTSYFAGFYENRKNIYSTKPQSTAIAYRLIHENLPKFIDNILVFQKIKEPIAKELEHIRADFSAGGYIKKDERLEDIFSLNYYIHVLSQAGIEKYNALIGKIVTEGDGEMKGLNEHINLYNQQRGREDRLPLFRPLYKQILSDREQLSYLPESFEKDEELLRALKEFYDHIAEDILGRTQQLMTSISEYDLSRIYVRNDSQLTDISKKMLGDWNAIYMARERAYDHEQAPKRITAKYERDRIKALKGEESISLANLNSCIAFLDNVRDCRVDTYLSTLGQKEGPHGLSNLVENVFASYHEAEQLLSFPYPEENNLIQDKDNVVLIKNLLDNISDLQRFLKPLWGMGDEPDKDERFYGEYNYIRGALDQVIPLYNKVRNYLTRKPYSTRKVKLNFGNSQLLSGWDRNKEKDNSCVILRKGQNFYLAIMNNRHKRSFENKVLPEYKEGEPYFEKMDYKFLPDPNKMLPKVFLSKKGIEIYKPSPKLLEQYGHGTHKKGDTFSMDDLHELIDFFKHSIEAHEDWKQFGFKFSDTATYENVSSFYREVEDQGYKLSFRKVSESYVYSLIDQGKLYLFQIYNKDFSPCSKGTPNLHTLYWRMLFDERNLADVIYKLDGKAEIFFREKSLKNDHPTHPAGKPIKKKSRQKKGEESLFEYDLVKDRHYTMDKFQFHVPITMNFKCSAGSKVNDMVNAHIREAKDMHVIGIDRGERNLLYICVIDSRGTILDQISLNTINDIDYHDLLESRDKDRQQERRNWQTIEGIKELKQGYLSQAVHRIAELMVAYKAVVALEDLNMGFKRGRQKVESSVYQQFEKQLIDKLNYLVDKKKRPEDIGGLLRAYQFTAPFKSFKEMGKQNGFLFYIPAWNTSNIDPTTGFVNLFHAQYENVDKAKSFFQKFDSISYNPKKDWFEFAFDYKNFTKKAEGSRSMWILCTHGSRIKNFRNSQKNGQWDSEEFALTEAFKSLFVRYEIDYTADLKTAIVDEKQKDFFVDLLKLFKLTVQMRNSWKEKDLDYLISPVAGADGRFFDTREGNKSLPKDADANGAYNIALKGLWALRQIRQTSEGGKLKLAISNKEWLQFVQERSYEKD

SEQ ID NO: 142 - protein, 1260 aa, Porphyromonas crevioricanis
MDSLKDFTNLYPVSKTLRFELKPVGKTLENIEKAGILKEDEHRAESYRRVKKIIDTYHKVFIDSSLENMAKMGIENEIKAMLQSFCELYKKDHRTEGEDKALDKIRAVLRGLIVGAFTGVCGRRENTVQNEKYESLFKEKLIKEILPDFVLSTEAESLPFSVEEATRSLKEFDSFTSYFAGFYENRKNIYSTKPQSTAIAYRLIHENLPKFIDNILVFQKIKEPIAKELEHIRADFSAGGYIKKDERLEDIFSLNYYIHVLSQAGIEKYNALIGKIVTEGDGEMKGLNEHINLYNQQRGREDRLPLFRPLYKQILSDREQLSYLPESFEKDEELLRALKEFYDHIAEDILGRTQQLMTSISEYDLSRIYVRNDSQLTDISKKMLGDWNAIYMARERAYDHEQAPKRITAKYERDRIKALKGEESISLANLNSCIAFLDNVRDCRVDTYLSTLGQKEGPHGLSNLVENVFASYHEAEQLLSFPYPEENNLIQDKDNVVLIKNLLDNISDLQRFLKPLWGMGDEPDKDERFYGEYNYIRGALDQVIPLYNKVRNYLTRKPYSTRKVKLNFGNSQLLSGWDRNKEKDNSCVILRKGQNFYLAIMNNRHKRSFENKVLPEYKEGEPYFEKMDYKFLPDPNKMLPKVFLSKKGIEIYKPSPKLLEQYGHGTHKKGDTFSMDDLHELIDFFKHSIEAHEDWKQFGFKFSDTATYENVSSFYREVEDQGYKLSFRKVSESYVYSLIDQGKLYLFQIYNKDFSPCSKGTPNLHTLYWRMLFDERNLADVIYKLDGKAEIFFREKSLKNDHPTHPAGKPIKKKSRQKKGEESLFEYDLVKDRRYTMDKFQFHVPITMNFKCSAGSKVNDMVNAHIREAKDMHVIGIDRGERNLLYICVIDSRGTILDQISLNTINDIDYHDLLESRDKDRQQERRNWQTIEGIKELKQGYLSQAVHRIAELMVAYKAVVALEDLNMGFKRGRQKVESSVYQQFEKQLIDKLNYLVDKKKRPEDIGGLLRAYQFTAPFKSFKEMGKQNGFLFYIPAWNTSNIDPTTGFVNLFHAQYENVDKAKSFFQKFDSISYNPKKDWFEFAFDYKNFTKKAEGSRSMWILCTHGSRIKNFRNSQKNGQWDSEEFALTEAFKSLFVRYEIDYTADLKTAIVDEKQKDFFVDLLKLFKLTVQMRNSWKEKDLDYLISPVAGADGRFFDTREGNKSLPKDADANGAYNIALKGLWALRQIRQTSEGGKLKLAISNKEWLQFVQERSYEKD

SEQ ID NO: 143 - protein, 1259 aa, Synergistes jonesii
MANSLKDFTNIYQLSKTLRFELKPIGKTEEHINRKLIIMHDEKRGEDYKSVTKLIDDYHRKFIHETLDPAHFDWNPLAEALIQSGSKNNKALPAEQKEMREKIISMFTSQAVYKKLFKKELFSELLPEMIKSELVSDLEKQAQLDAVKSFDKFSTYFTGFHENRKNIYSKKDTSTSIAFRIVHQNFPKFLANVRAYTLIKERAPEVIDKAQKELSGILGGKTLDDIFSIESFNNVLTQDKIDYYNQIIGGVSGKAGDKKLRGVNEFSNLYRQQHPEVASLRIKMVPLYKQILSDRTTLSFVPEALKDDEQAINAVDGLRSELERNDIFNRIKRLFGKNNLYSLDKIWIKNSSISAFSNELFKNWSFIEDALKEFKENEFNGARSAGKKAEKWLKSKYFSFADIDAAVKSYSEQVSADISSAPSASYFAKFTNLIETAAENGRKFSYFAAESKAFRGDDGKTEIIKAYLDSLNDILHCLKPFETEDISDIDTEFYSAFAEIYDSVKDVIPVYNAVRNYTTQKPFSTEKFKLNFENPALAKGWDKNKEQNNTAIILMKDGKYYLGVIDKNNKLRADDLADDGSAYGYMKMNYKFIPTPHMELPKVFLPKRAPKRYNPSREILLIKENKTFIKDKNFNRTDCHKLIDFFKDSINKHKDWRTFGFDFSDTDSYEDISDFYMEVQDQGYKLTFTRLSAEKIDKWVEEGRLFLFQIYNKDFADGAQGSPNLHTLYWKAIFSEENLKDVVLKLNGEAELFFRRKSIDKPAVHAKGSMKVNRRDIDGNPIDEGTYVEICGYANGKRDMASLNAGARGLIESGLVRITEVKHELVKDKRYTIDKYFFHVPFTINFKAQGQGNINSDVNLFLRNNKDVNIIGIDRGERNLVYVSLIDRDGHIKLQKDFNIIGGMDYHAKLNQKEKERDTARKSWKTIGTIKELKEGYLSQVVHEIVRLAVDNNAVIVMEDLNIGFKRGRFKVEKQVYQKFEKMLIDKLNYLVFKDAGYDAPCGILKGLQLTEKFESFTKLGKQCGIIFYIPAGYTSKIDPTTGFVNLFNINDVSSKEKQKDFIGKLDSIRFDAKRDMFTFEFDYDKFRTYQTSYRKKWAVWTNGKRIVREKDKDGKFRMNDRLLTEDMKNILNKYALAYKAGEDILPDVISRDKSLASEIFYVFKNTLQMRNSKRDTGEDFIISPVLNAKGRFFDSRKTDAALPIDADANGAYHIALKGSLVLDAIDEKLKEDGRIDYKDMAVSNPKWFEFMQTRKFDF

SEQ ID NO: 144 - protein, 1262 aa, Synergistes jonesii
MENMANSLKDFTNIYQLSKTLRFELKPIGKTEEHINRKLIIMHDEKRGEDYKSVTKLIDDYHRKFIHETLDPAHFDWNPLAEALIQSGSKNNKALPAEQKEMREKIISMFTSQAVYKKLFKKELFSELLPEMIKSELVSDLEKQAQLDAVKSFDKFSTYFTGFHENRKNIYSKKDTSTSIAFRIVHQNFPKFLANVRAYTLIKERAPEVIDKAQKELSGILGGKTLDDIFSIESFNNVLTQDKIDYYNQIIGGVSGKAGDKKLRGVNEFSNLYRQQHPEVASLRIKMVPLYKQILSDRTTLSFVPEALKDDEQAINAVDGLRSELERNDIFNRIKRLFGKNNLYSLDKIWIKNSSISAFSNELFKNWSFIEDALKEFKENEFNGARSAGKKAEKWLKSKYFSFADIDAAVKSYSEQVSADISSAPSASYFAKFTNLIETAAENGRKFSYFAAESKAFRGDDGKTEIIKAYLDSLNDILHCLKPFETEDISDIDTEFYSAFAEIYDSVKDVIPVYNAVRNYTTQKPFSTEKFKLNFENPALAKGWDKNKEQNNTAIILMKDGKYYLGVIDKNNKLRADDLADDGSAYGYMKMNYKFIPTPHMELPKVFLPKRAPKRYNPSREILLIKENKTFIKDKNFNRTDCHKLIDFFKDSINKHKDWRTFGFDFSDTDSYEDISDFYMEVQDQGYKLTFTRLSAEKIDKWVEEGRLFLFQIYNKDFADGAQGSPNLHTLYWKAIFSEENLKDVVLKLNGEAELFFRRKSIDKPAVHAKGSMKVNRRDIDGNPIDEGTYVEICGYANGKRDMASLNAGARGLIESGLVRITEVKHELVKDKRYTIDKYFFHVPFTINFKAQGQGNINSDVNLFLRNNKDVNIIGIDRGERNLVYVSLIDRDGHIKLQKDFNIIGGMDYHAKLNQKEKERDTARKSWKTIGTIKELKEGYLSQVVHEIVRLAVDNNAVIVMEDLNIGFKRGRFKVEKQVYQKFEKMLIDKLNYLVFKDAGYDAPCGILKGLQLTEKFESFTKLGKQCGIIFYIPAGYTSKIDPTTGFVNLFNINDVSSKEKQKDFIGKLDSIRFDAKRDMFTFEFDYDKFRTYQTSYRKKWAVWTNGKRIVREKDKDGKFRMNDRLLTEDMKNILNKYALAYKAGEDILPDVISRDKSLASEIFYVFKNTLQMRNSKRDTGEDFIISPVLNAKGRFFDSRKTDAALPIDADANGAYHIALKGSLVLDAIDEKLKEDGRIDYKDMAVSNPKWFEFMQTRKFDF

SEQ ID NO: 145 - protein, 1257 aa, Prevotella bryantii
  source 1..1257: note = Prevotella bryantii B14
MQINNLKIIYMKFTDFTGLYSLSKTLRFELKPIGKTLENIKKAGLLEQDQHRADSYKKVKKIIDEYHKAFIEKSLSNFELKYQSEDKLDSLEEYLMYYSMKRIEKTEKDKFAKIQDNLRKQIADHLKGDESYKTIFSKDLIRKNLPDFVKSDEERTLIKEFKDFTTYFKGFYENRENMYSAEDKSTAISHRIIHENLPKFVDNINAFSKIILIPELREKLNQIYQDFEEYLNVESIDEIFHLDYFSMVMTQKQIEVYNAIIGGKSTNDKKIQGLNEYINLYNQKHKDCKLPKLKLLFKQILSDRIAISWLPDNFKDDQEALDSIDTCYKNLLNDGNVLGEGNLKLLLENIDTYNLKGIFIRNDLQLTDISQKMYASWNVIQDAVILDLKKQVSRKKKESAEDYNDRLKKLYTSQESFSIQYLNDCLRAYGKTENIQDYFAKLGAVNNEHEQTINLFAQVRNAYTSVQAILTTPYPENANLAQDKETVALIKNLLDSLKRLQRFIKPLLGKGDESDKDERFYGDFTPLWETLNQITPLYNMVRNYMTRKPYSQEKIKLNFENSTLLGGWDLNKEHDNTAIILRKNGLYYLAIMKKSANKIFDKDKLDNSGDCYEKMVYKLLPGANKMLPKVFFSKSRIDEFKPSENIIENYKKGTHKKGANFNLADCHNLIDFFKSSISKHEDWSKFNFHFSDTSSYEDLSDFYREVEQQGYSISFCDVSVEYINKMVEKGDLYLFQIYNKDFSEFSKGTPNMHTLYWNSLFSKENLNNIIYKLNGQAEIFFRKKSLNYKRPTHPAHQAIKNKNKCNEKKESIFDYDLVKDKRYTVDKFQFHVPITMNFKSTGNTNINQQVIDYLRTEDDTHIIGIDRGERHLLYLVVIDSHGKIVEQFTLNEIVNEYGGNIYRTNYHDLLDTREQNREKARESWQTIENIKELKEGYISQVIHKITDLMQKYHAVVVLEDLNMGFMRGRQKVEKQVYQKFEEMLINKLNYLVNKKADQNSAGGLLHAYQLTSKFESFQKLGKQSGFLFYIPAWNTSKIDPVTGFVNLFDTRYESIDKAKAFFGKFDSIRYNADKDWFEFAFDYNNFTTKAEGTRTNWTICTYGSRIRTFRNQAKNSQWDNEEIDLTKAYKAFFAKHGINIYDNIKEAIAMETEKSFFEDLLHLLKLTLQMRNSITGTTTDYLISPVHDSKGNFYDSRICDNSLPANADANGAYNIARKGLMLIQQIKDSTSSNRFKFSPITNKDWLIFAQEKPYLND

SEQ ID NO: 146 - protein, 1253 aa, Prevotella albensis
MNIKNFTGLYPLSKTLRFELKPIGKTKENIEKNGILTKDEQRAKDYLIVKGFIDEYHKQFIKDRLWDFKLPLESEGEKNSLEEYQELYELTKRNDAQEADFTEIKDNLRSSITEQLTKSGSAYDRIFKKEFIREDLVNFLEDEKDKNIVKQFEDFTTYFTGFYENRKNMYSSEEKSTAIAYRLIHQNLPKFMDNMRSFAKIANSSVSEHFSDIYESWKEYLNVNSIEEIFQLDYFSETLTQPHIEVYNYIIGKKVLEDGTEIKGINEYVNLYNQQQKDKSKRLPFLVPLYKQILSDREKLSWIAEEFDSDKKMLSAITESYNHLHNVLMGNENESLRNLLLNIKDYNLEKINITNDLSLTEISQNLFGRYDVFTNGIKNKLRVLTPRKKKETDENFEDRINKIFKTQKSFSIAFLNKLPQPEMEDGKPRNIEDYFITQGAINTKSIQKEDIFAQIENAYEDAQVFLQIKDTDNKLSQNKTAVEKIKTLLDALKELQHFIKPLLGSGEENEKDELFYGSFLAIWDELDTITPLYNKVRNWLTRKPYSTEKIKLNFDNAQLLGGWDVNKEHDCAGILLRKNDSYYLGIINKKTNHIFDTDITPSDGECYDKIDYKLLPGANKMLPKVFFSKSRIKEFEPSEAIINCYKKGTHKKGKNFNLTDCHRLINFFKTSIEKHEDWSKFGFKFSDTETYEDISGFYREVEQQGYRLTSHPVSASYIHSLVKEGKLYLFQIWNKDFSQFSKGTPNLHTLYWKMLFDKRNLSDVVYKLNGQAEVFYRKSSIEHQNRIIHPAQHPITNKNELNKKHTSTFKYDIIKDRRYTVDKFQFHVPITINFKATGQNNINPIVQEVIRQNGITHIIGIDRGERHLLYLSLIDLKGNIIKQMTLNEIINEYKGVTYKTNYHNLLEKREKERTEARHSWSSIESIKELKDGYMSQVIHKITDMMVKYNAIVVLEDLNGGFMRGRQKVEKQVYQKFEKKLIDKLNYLVDKKLDANEVGGVLNAYQLTNKFESFKKIGKQSGFLFYIPAWNTSKIDPITGFVNLFNTRYESIKETKVFWSKFDIIRYNKEKNWFEFVFDYNTFTTKAEGTRTKWTLCTHGTRIQTFRNPEKNAQWDNKEINLTESFKALFEKYKIDITSNLKESIMQETEKKFFQELHNLLHLTLQMRNSVTGTDIDYLISPVADEDGNFYDSRINGKNFPENADANGAYNIARKGLMLIRQIKQADPQKKFKFETITNKDWLKFAQDKPYLKD

SEQ ID NO: 147 - protein, 1250 aa, Smithella sp.
  source 1..1250: note = Smithella sp. SC_K08D17
MQTLFENFTNQYPVSKTLRFELIPQGKTKDFIEQKGLLKKDEDRAEKYKKVKNIIDEYHKDFIEKSLNGLKLDGLEKYKTLYLKQEKDDKDKKAFDKEKENLRKQIANAFRNNEKFKTLFAKELIKNDLMSFACEEDKKNVKEFEAFTTYFTGFHQNRANMYVADEKRTAIASRLIHENLPKFIDNIKIFEKMKKEAPELLSPFNQTLKDMKDVIKGTTLEEIFSLDYFNKTLTQSGIDIYNSVIGGRTPEEGKTKIKGLNEYINTDFNQKQTDKKKRQPKFKQLYKQILSDRQSLSFIAEAFKNDTEILEAIEKFYVNELLHFSNEGKSTNVLDAIKNAVSNLESFNLTKMYFRSGASLTDVSRKVFGEWSIINRALDNYYATTYPIKPREKSEKYEERKEKWLKQDFNVSLIQTAIDEYDNETVKGKNSGKVIADYFAKFCDDKETDLIQKVNEGYIAVKDLLNTPCPENEKLGSNKDQVKQIKAFMDSIMDIMHFVRPLSLKDTDKEKDETFYSLFTPLYDHLTQTIALYNKVRNYLTQKPYSTEKIKLNFENSTLLGGWDLNKETDNTAIILRKDNLYYLGIMDKRHNRIFRNVPKADKKDFCYEKMVYKLLPGANKMLPKVFFSQSRIQEFTPSAKLLENYANETHKKGDNFNLNHCHKLIDFFKDSINKHEDWKNFDFRFSATSTYADLSGFYHEVEHQGYKISFQSVADSFIDDLVNEGKLYLFQIYNKDFSPFSKGKPNLHTLYWKMLFDENNLKDVVYKLNGEAEVFYRKKSIAEKNTTIHKANESIINKNPDNPKATSTFNYDIVKDKRYTIDKFQFHIPITMNFKAEGIFNMNQRVNQFLKANPDINIIGIDRGERHLLYYALINQKGKILKQDTLNVIANEKQKVDYHNLLDKKEGDRATARQEWGVIETIKELKEGYLSQVIHKLTDLMIENNAIIVMEDLNFGFKRGRQKVEKQVYQKFEKMLIDKLNYLVDKNKKANELGGLLNAFQLANKFESFQKMGKQNGFIFYVPAWNTSKTDPATGFIDFLKPRYENLNQAKDFFEKFDSIRLNSKADYFEFAFDFKNFTEKADGGRTKWTVCTTNEDRYAWNRALNNNRGSQEKYDITAELKSLFDGKVDYKSGKDLKQQIASQESADFFKALMKNLSITLSLRHNNGEKGDNEQDYILSPVADSKGRFFDSRKADDDMPKNADANGAYHIALKGLWCLEQISKTDDLKKVKLAISNKEWLEFVQTLKG

SEQ ID NO: 148 - protein, 1250 aa, Smithella sp.
  source 1..1250: note = Smithella sp. SCADC
MQTLFENFTNQYPVSKTLRFELIPQGKTKDFIEQKGLLKKDEDRAEKYKKVKNIIDEYHKDFIEKSLNGLKLDGLEEYKTLYLKQEKDDKDKKAFDKEKENLRKQIANAFRNNEKFKTLFAKELIKNDLMSFACEEDKKNVKEFEAFTTYFTGFHQNRANMYVADEKRTAIASRLIHENLPKFIDNIKIFEKMKKEAPELLSPFNQTLKDMKDVIKGTTLEEIFSLDYFNKTLTQSGIDIYNSVIGGRTPEEGKTKIKGLNEYINTDFNQKQTDKKKRQPKFKQLYKQILSDRQSLSFIAEAFKNDTEILEAIEKFYVNELLHFSNEGKSTNVLDAIKNAVSNLESFNLTKIYFRSGTSLTDVSRKVFGEWSIINRALDNYYATTYPIKPREKSEKYEERKEKWLKQDFNVSLIQTAIDEYDNETVKGKNSGKVIVDYFAKFCDDKETDLIQKVNEGYIAVKDLLNTPYPENEKLGSNKDQVKQIKAFMDSIMDIMHFVRPLSLKDTDKEKDETFYSLFTPLYDHLTQTIALYNKVRNYLTQKPYSTEKIKLNFENSTLLGGWDLNKETDNTAIILRKENLYYLGIMDKRHNRIFRNVPKADKKDSCYEKMVYKLLPGANKMLPKVFFSQSRIQEFTPSAKLLENYENETHKKGDNFNLNHCHQLIDFFKDSINKHEDWKNFDFRFSATSTYADLSGFYHEVEHQGYKISFQSIADSFIDDLVNEGKLYLFQIYNKDFSPFSKGKPNLHTLYWKMLFDENNLKDVVYKLNGEAEVFYRKKSIAEKNTTIHKANESIINKNPDNPKATSTFNYDIVKDKRYTIDKFQFHVPITMNFKAEGIFNMNQRVNQFLKANPDINIIGIDRGERHLLYYTLINQKGKILKQDTLNVIANEKQKVDYHNLLDKKEGDRATARQEWGVIETIKELKEGYLSQVIHKLTDLMIENNAIIVMEDLNFGFKRGRQKVEKQVYQKFEKMLIDKLNYLVDKNKKANELGGLLNAFQLANKFESFQKMGKQNGFIFYVPAWNTSKTDPATGFIDFLKPRYENLKQAKDFFEKFDSIRLNSKADYFEFAFDFKNFTGKADGGRTKWTVCTTNEDRYAWNRALNNNRGSQEKYDITAELKSLFDGKVDYKSGKDLKQQIASQELADFFRTLMKYLSVTLSLRHNNGEKGETEQDYILSPVADSMGKFFDSRKAGDDMPKNADANGAYHIALKGLWCLEQISKTDDLKKVKLAISNKEWLEFMQTLKG

SEQ ID NO: 149 - protein, 1247 aa, Prevotella bryantii
  source 1..1247: note = Prevotella bryantii B14
MKFTDFTGLYSLSKTLRFELKPIGKTLENIKKAGLLEQDQHRADSYKKVKKIIDEYHKAFIEKSLSNFELKYQSEDKLDSLEEYLMYYSMKRIEKTEKDKFAKIQDNLRKQIADHLKGDESYKTIFSKDLIRKNLPDFVKSDEERTLIKEFKDFTTYFKGFYENRENMYSAEDKSTAISHRIIHENLPKFVDNINAFSKIILIPELREKLNQIYQDFEEYLNVESIDEIFHLDYFSMVMTQKQIEVYNAIIGGKSTNDKKIQGLNEYINLYNQKHKDCKLPKLKLLFKQILSDRIAISWLPDNFKDDQEALDSIDTCYKNLLNDGNVLGEGNLKLLLENIDTYNLKGIFIRNDLQLTDISQKMYASWNVIQDAVILDLKKQVSRKKKESAEDYNDRLKKLYTSQESFSIQYLNDCLRAYGKTENIQDYFAKLGAVNNEHEQTINLFAQVRNAYTSVQAILTTPYPENANLAQDKETVALIKNLLDSLKRLQRFIKPLLGKGDESDKDERFYGDFTPLWETLNQITPLYNMVRNYMTRKPYSQEKIKLNFENSTLLGGWDLNKEHDNTAIILRKNGLYYLAIMKKSANKIFDKDKLDNSGDCYEKMVYKLLPGANKMLPKVFFSKSRIDEFKPSENIIENYKKGTHKKGANFNLADCHNLIDFFKSSISKHEDWSKFNFHFSDTSSYEDLSDFYREVEQQGYSISFCDVSVEYINKMVEKGDLYLFQIYNKDFSEFSKGTPNMHTLYWNSLFSKENLNNIIYKLNGQAEIFFRKKSLNYKRPTHPAHQAIKNKNKCNEKKESIFDYDLVKDKRYTVDKFQFHVPITMNFKSTGNTNINQQVIDYLRTEDDTHIIGIDRGERHLLYLVVIDSHGKIVEQFTLNEIVNEYGGNIYRTNYHDLLDTREQNREKARESWQTIENIKELKEGYISQVIHKITDLMQKYHAVVVLEDLNMGFMRGRQKVEKQVYQKFEEMLINKLNYLVNKKADQNSAGGLLHAYQLTSKFESFQKLGKQSGFLFYIPAWNTSKIDPVTGFVNLFDTRYESIDKAKAFFGKFDSIRYNADKDWFEFAFDYNNFTTKAEGTRTNWTICTYGSRIRTFRNQAKNSQWDNEEIDLTKAYKAFFAKHGINIYDNIKEAIAMETEKSFFEDLLHLLKLTLQMRNSITGTTTDYLISPVHDSKGNFYDSRICDNSLPANADANGAYNIARKGLMLIQQIKDSTSSNRFKFSPITNKDWLIFAQEKPYLND

SEQ ID NO: 150 - protein, 1247 aa, unidentified
  source 1..1247: note = Uncultured bacterium (gcode 4)
MFKGDAFTGLYEVQKTLRFELVPIGLTQSYLENDWVIQKDKEVEENYGKIKAYFDLIHKEFVRQSLENAWLCQLDDFYEKYIELHNSLETRKDKNLAKQFEKVMKSLKKEFVSFFDAKWNEWKQKFSFLKKWWIDVLNEKEVLDLMAEFYPDEKELFDKFDKFFTYFSNFKESRKNFYADDGRAWAIATRAIDENLITFIKNIEDFKKLNSSFREFVNDNFSEEDKQIFEIDFYNNCLLQPWIDKYNKIVWWYSLENWEKVQWLNEKINNFKQNQNKSNSKDLKFPRMKLLYKQILGDKEKKVYIDEIRDDKNLIDLIDNSKRRNQIKIDNANDIINDFINNNAKFELDKIYLTRQSINTISSKYFSSWDYIRWYFWTGELQEFVSFYDLKETFWKIEYETLENIFKDCYVKGINTESQNNIVFETQGIYENFLNIFKFEFNQNISQISLLEWELDKIQNEDIKKNEKQVEVIKNYFDSVMSVYKMTKYFSLEKWKKRVELDTDNNFYNDFNEYLEGFEIWKDYNLVRNYITKKQVNTDKIKLNFDNSQFLTWWDKDKENERLGIILRREWKYYLWILKKWNTLNFGDYLQKEWEIFYEKMNYKQLNNVYRQLPRLLFPLTKKLNELKWDELKKYLSKYIQNFWYNEEIAQIKIEFDIFQESKEKWEKFDIDKLRKLIEYYKKWVLALYSDLYDLEFIKYKNYDDLSIFYSDVEKKMYNLNFTKIDKSLIDGKVKSWELYLFQIYNKDFSESKKEWSTENIHTKYFKLLFNEKNLQNLVVKLSWWADIFFRDKTENLKFKKDKNGQEILDHRRFSQDKIMFHISITLNANCWDKYWFNQYVNEYMNKERDIKIIWIDRWEKHLAYYCVIDKSWKIFNNEIWTLNELNWVNYLEKLEKIESSRKDSRISWWEIENIKELKNGYISQVINKLTELIVKYNAIIVFEDLNIWFKRWRQKIEKQIYQKLELALAKKLNYLTQKDKKDDEILWNLKALQLVPKVNDYQDIWNYKQSWIMFYVRANYTSVTCPNCWLRKNLYISNSATKENQKKSLNSIAIKYNDWKFSFSYEIDDKSWKQKQSLNKKKFIVYSDIERFVYSPLEKLTKVIDVNKKLLELFRDFNLSLDINKQIQEKDLDSVFFKSLTHLFNLILQLRNSDSKDNKDYISCPSCYYHSNNWLQWFEFNWDANWAYNIARKGIILLDRIRKNQEKPDLYVSDIDWDNFVQSNQFPNTIIPIQNIEKQVPLNIKI

SEQ ID NO: 151 - protein, 1246 aa, Porphyromonas macacae
MKTQHFFEDFTSLYSLSKTIRFELKPIGKTLENIKKNGLIRRDEQRLDDYEKLKKVIDEYHEDFIANILSSFSFSEEILQSYIQNLSESEARAKIEKTMRDTLAKAFSEDERYKSIFKKELVKKDIPVWCPAYKSLCKKFDNFTTSLVPFHENRKNLYTSNEITASIPYRIVHVNLPKFIQNIEALCELQKKMGADLYLEMMENLRNVWPSFVKTPDDLCNLKTYNHLMVQSSISEYNRFVGGYSTEDGTKHQGINEWINIYRQRNKEMRLPGLVFLHKQILAKVDSSSFISDTLENDDQVFCVLRQFRKLFWNTVSSKEDDAASLKDLFCGLSGYDPEAIYVSDAHLATISKNIFDRWNYISDAIRRKTEVLMPRKKESVERYAEKISKQIKKRQSYSLAELDDLLAHYSEESLPAGFSLLSYFTSLGGQKYLVSDGEVILYEEGSNIWDEVLIAFRDLQVILDKDFTEKKLGKDEEAVSVIKKALDSALRLRKFFDLLSGTGAEIRRDSSFYALYTDRMDKLKGLLKMYDKVRNYLTKKPYSIEKFKLHFDNPSLLSGWDKNKELNNLSVIFRQNGYYYLGIMTPKGKNLFKTLPKLGAEEMFYEKMEYKQIAEPMLMLPKVFFPKKTKPAFAPDQSVVDIYNKKTFKTGQKGFNKKDLYRLIDFYKEALTVHEWKLFNFSFSPTEQYRNIGEFFDEVREQAYKVSMVNVPASYIDEAVENGKLYLFQIYNKDFSPYSKGIPNLHTLYWKALFSEQNQSRVYKLCGGGELFYRKASLHMQDTTVHPKGISIHKKNLNKKGETSLFNYDLVKDKRFTEDKFFFHVPISINYKNKKITNVNQMVRDYIAQNDDLQIIGIDRGERNLLYISRIDTRGNLLEQFSLNVIESDKGDLRTDYQKILGDREQERLRRRQEWKSIESIKDLKDGYMSQVVHKICNMVVEHKAIVVLENLNLSFMKGRKKVEKSVYEKFERMLVDKLNYLVVDKKNLSNEPGGLYAAYQLTNPLFSFEELHRYPQSGILFFVDPWNTSLTDPSTGFVNLLGRINYTNVGDARKFFDRFNAIRYDGKGNILFDLDLSRFDVRVETQRKLWTLTTFGSRIAKSKKSGKWMVERIENLSLCFLELFEQFNIGYRVEKDLKKAILSQDRKEFYVRLIYLFNLMMQIRNSDGEEDYILSPALNEKNLQFDSRLIEAKDLPVDADANGAYNVARKGLMVVQRIKRGDHESIHRIGRAQWLRYVQEGIVE

SEQ ID NO: 152 - protein, 1241 aa, Butyrivibrio proteoclasticus
MLLYENYTKRNQITKSLRLELRPQGKTLRNIKELNLLEQDKAIYALLERLKPVIDEGIKDIARDTLKNCELSFEKLYEHFLSGDKKAYAKESERLKKEIVKTLIKNLPEGIGKISEINSAKYLNGVLYDFIDKTHKDSEEKQNILSDILETKGYLALFSKFLTSRITTLEQSMPKRVIENFEIYAANIPKMQDALERGAVSFAIEYESICSVDYYNQILSQEDIDSYNRLISGIMDEDGAKEKGINQTISEKNIKIKSEHLEEKPFRILKQLHKQILEEREKAFTIDHIDSDEEVVQVTKEAFEQTKEQWENIKKINGFYAKDPGDITLFIVVGPNQTHVLSQLIYGEHDRIRLLLEEYEKNTLEVLPRRTKSEKARYDKFVNAVPKKVAKESHTFDGLQKMTGDDRLFILYRDELARNYMRIKEAYGTFERDILKSRRGIKGNRDVQESLVSFYDELTKFRSALRIINSGNDEKADPIFYNTFDGIFEKANRTYKAENLCRNYVTKSPADDARIMASCLGTPARLRTHWWNGEENFAINDVAMIRRGDEYYYFVLTPDVKPVDLKTKDETDAQIFVQRKGAKSFLGLPKALFKCILEPYFESPEHKNDKNCVIEEYVSKPLTIDRRAYDIFKNGTFKKTNIGIDGLTEEKFKDDCRYLIDVYKEFIAVYTRYSCFNMSGLKRADEYNDIGEFFSDVDTRLCTMEWIPVSFERINDMVDKKEGLLFLVRSMFLYNRPRKPYERTFIQLFSDSNMEHTSMLLNSRAMIQYRAASLPRRVTHKKGSILVALRDSNGEHIPMHIREAIYKMKNNFDISSEDFIMAKAYLAEHDVAIKKANEDIIRNRRYTEDKFFLSLSYTKNADISARTLDYINDKVEEDTQDSRMAVIVTRNLKDLTYVAVVDEKNNVLEEKSLNEIDGVNYRELLKERTKIKYHDKTRLWQYDVSSKGLKEAYVELAVTQISKLATKYNAVVVVESMSSTFKDKFSFLDEQIFKAFEARLCARMSDLSFNTIKEGEAGSISNPIQVSNNNGNSYQDGVIYFLNNAYTRTLCPDTGFVDVFDKTRLITMQSKRQFFAKMKDIRIDDGEMLFTFNLEEYPTKRLLDRKEWTVKIAGDGSYFDKDKGEYVYVNDIVREQIIPALLEDKAVFDGNMAEKFLDKTAISGKSVELIYKWFANALYGIITKKDGEKIYRSPITGTEIDVSKNTTYNFGKKFMFKQEYRGDGDFLDAFLNYMQAQDIAV

SEQ ID NO: 153 - protein, 1238 aa, unidentified
  source 1..1238: note = Candidatus Methanoplasma termitum
MNNYDEFTKLYPIQKTIRFELKPQGRTMEHLETFNFFEEDRDRAEKYKILKEAIDEYHKKFIDEHLTNMSLDWNSLKQISEKYYKSREEKDKKVFLSEQKRMRQEIVSEFKKDDRFKDLFSKKLFSELLKEEIYKKGNHQEIDALKSFDKFSGYFIGLHENRKNMYSDGDEITAISNRIVNENFPKFLDNLQKYQEARKKYPEWIIKAESALVAHNIKMDEVFSLEYFNKVLNQEGIQRYNLALGGYVTKSGEKMMGLNDALNLAHQSEKSSKGRIHMTPLFKQILSEKESFSYIPDVFTEDSQLLPSIGGFFAQIENDKDGNIFDRALELISSYAEYDTERIYIRQADINRVSNVIFGEWGTLGGLMREYKADSINDINLERTCKKVDKWLDSKEFALSDVLEAIKRTGNNDAFNEYISKMRTAREKIDAARKEMKFISEKISGDEESIHIIKTLLDSVQQFLHFFNLFKARQDIPLDGAFYAEFDEVHSKLFAIVPLYNKVRNYLTKNNLNTKKIKLNFKNPTLANGWDQNKVYDYASLIFLRDGNYYLGIINPKRKKNIKFEQGSGNGPFYRKMVYKQIPGPNKNLPRVFLTSTKGKKEYKPSKEIIEGYEADKHIRGDKFDLDFCHKLIDFFKESIEKHKDWSKFNFYFSPTESYGDISEFYLDVEKQGYRMHFENISAETIDEYVEKGDLFLFQIYNKDFVKAATGKKDMHTIYWNAAFSPENLQDVVVKLNGEAELFYRDKSDIKEIVHREGEILVNRTYNGRTPVPDKIHKKLTDYHNGRTKDLGEAKEYLDKVRYFKAHYDITKDRRYLNDKIYFHVPLTLNFKANGKKNLNKMVIEKFLSDEKAHIIGIDRGERNLLYYSIIDRSGKIIDQQSLNVIDGFDYREKLNQREIEMKDARQSWNAIGKIKDLKEGYLSKAVHEITKMAIQYNAIVVMEELNYGFKRGRFKVEKQIYQKFENMLIDKMNYLVFKDAPDESPGGVLNAYQLTNPLESFAKLGKQTGILFYVPAAYTSKIDPTTGFVNLFNTSSKTNAQERKEFLQKFESISYSAKDGGIFAFAFDYRKFGTSKTDHKNVWTAYTNGERMRYIKEKKRNELFDPSKEIKEALTSSGIKYDGGQNILPDILRSNNNGLIYTMYSSFIAAIQMRVYDGKEDYIISPIKNSKGEFFRTDPKRRELPIDADANGAYNIALRGELTMRAIAEKFDPDSEKMAKLELKHKDWFEFMQTRGD

SEQ ID NO: 154 - protein, 1235 aa, Anaerovibrio sp.
  source 1..1235: note = Anaerovibrio sp. RM50
MVAFIDEFVGQYPVSKTLRFEARPVPETKKWLESDQCSVLFNDQKRNEYYGVLKELLDDYYRAYIEDALTSFTLDKALLENAYDLYCNRDTNAFSSCCEKLRKDLVKAFGNLKDYLLGSDQLKDLVKLKAKVDAPAGKGKKKIEVDSRLINWLNNNAKYSAEDREKYIKAIESFEGFVTYLTNYKQARENMFSSEDKSTAIAFRVIDQNMVTYFGNIRIYEKIKAKYPELYSALKGFEKFFSPTAYSEILSQSKIDEYNYQCIGRPIDDADFKGVNSLINEYRQKNGIKARELPVMSMLYKQILSDRDNSFMSEVINRNEEAIECAKNGYKVSYALFNELLQLYKKIFTEDNYGNIYVKTQPLTELSQALFGDWSILRNALDNGKYDKDIINLAELEKYFSEYCKVLDADDAAKIQDKFNLKDYFIQKNALDATLPDLDKITQYKPHLDAMLQAIRKYKLFSMYNGRKKMDVPENGIDFSNEFNAIYDKLSEFSILYDRIRNFATKKPYSDEKMKLSFNMPTMLAGWDYNNETANGCFLFIKDGKYFLGVADSKSKNIFDFKKNPHLLDKYSSKDIYYKVKYKQVSGSAKMLPKVVFAGSNEKIFGHLISKRILEIREKKLYTAAAGDRKAVAEWIDFMKSAIAIHPEWNEYFKFKFKNTAEYDNANKFYEDIDKQTYSLEKVEIPTEYIDEMVSQHKLYLFQLYTKDFSDKKKKKGTDNLHTMYWHGVFSDENLKAVTEGTQPIIKLNGEAEMFMRNPSIEFQVTHEHNKPIANKNPLNTKKESVFNYDLIKDKRYTERKFYFHCPITLNFRADKPIKYNEKINRFVENNPDVCIIGIDRGERHLLYYTVINQTGDILEQGSLNKISGSYTNDKGEKVNKETDYHDLLDRKEKGKHVAQQAWETIENIKELKAGYLSQVVYKLTQLMLQYNAVIVLENLNVGFKRGRTKVEKQVYQKFEKAMIDKLNYLVFKDRGYEMNGSYAKGLQLTDKFESFDKIGKQTGCIYYVIPSYTSHIDPKTGFVNLLNAKLRYENITKAQDTIRKFDSISYNAKADYFEFAFDYRSFGVDMARNEWVVCTCGDLRWEYSAKTRETKAYSVTDRLKELFKAHGIDYVGGENLVSHITEVADKHFLSTLLFYLRLVLKMRYTVSGTENENDFILSPVEYAPGKFFDSREATSTEPMNADANGAYHIALKGLMTIRGIEDGKLHNYGKGGENAAWFKFMQNQEYKNNG

SEQ ID NO: 155 - protein, 1233 aa, unidentified
  source 1..1233: note = Lachnospiraceae bacterium MC2017
MDYGNGQFERRAPLTKTITLRLKPIGETRETIREQKLLEQDAAFRKLVETVTPIVDDCIRKIADNALCHFGTEYDFSCLGNAISKNDSKAIKKETEKVEKLLAKVLTENLPDGLRKVNDINSAAFIQDTLTSFVQDDADKRVLIQELKGKTVLMQRFLTTRITALTVWLPDRVFENFNIFIENAEKMRILLDSPLNEKIMKFDPDAEQYASLEFYGQCLSQKDIDSYNLIISGIYADDEVKNPGINEIVKEYNQQIRGDKDESPLPKLKKLHKQILMPVEKAFFVRVLSNDSDARSILEKILKDTEMLPSKIIEAMKEADAGDIAVYGSRLHELSHVIYGDHGKLSQIIYDKESKRISELMETLSPKERKESKKRLEGLEEHIRKSTYTFDELNRYAEKNVMAAYIAAVEESCAEIMRKEKDLRTLLSKEDVKIRGNRHNTLIVKNYFNAWTVFRNLIRILRRKSEAEIDSDFYDVLDDSVEVLSLTYKGENLCRSYITKKIGSDLKPEIATYGSALRPNSRWWSPGEKFNVKFHTIVRRDGRLYYFILPKGAKPVELEDMDGDIECLQMRKIPNPTIFLPKLVFKDPEAFFRDNPEADEFVFLSGMKAPVTITRETYEAYRYKLYTVGKLRDGEVSEEEYKRALLQVLTAYKEFLENRMIYADLNFGFKDLEEYKDSSEFIKQVETHNTFMCWAKVSSSQLDDLVKSGNGLLFEIWSERLESYYKYGNEKVLRGYEGVLLSILKDENLVSMRTLLNSRPMLVYRPKESSKPMVVHRDGSRVVDRFDKDGKYIPPEVHDELYRFFNNLLIKEKLGEKARKILDNKKVKVKVLESERVKWSKFYDEQFAVTFSVKKNADCLDTTKDLNAEVMEQYSESNRLILIRNTTDILYYLVLDKNGKVLKQRSLNIINDGARDVDWKERFRQVTKDRNEGYNEWDYSRTSNDLKEVYLNYALKEIAEAVIEYNAILIIEKMSNAFKDKYSFLDDVTFKGFETKLLAKLSDLHFRGIKDGEPCSFTNPLQLCQNDSNKILQDGVIFMVPNSMTRSLDPDTGFIFAINDHNIRTKKAKLNFLSKFDQLKVSSEGCLIMKYSGDSLPTHNTDNRVWNCCCNHPITNYDRETKKVEFIEEPVEELSRVLEENGIETDTELNKLNERENVPGKVVDAIYSLVLNYLRGTVSGVAGQRAVYYSPVTGKKYDISFIQAMNLNRKCDYYRIGSKERGEWTDFVAQLIN

SEQ ID NO: 156 - protein, 1235 aa, unidentified
  source 1..1235: note = Lachnospiraceae bacterium MC2017
MTMDYGNGQFERRAPLTKTITLRLKPIGETRETIREQKLLEQDAAFRKLVETVTPIVDDCIRKIADNALCHFGTEYDFSCLGNAISKNDSKAIKKETEKVEKLLAKVLTENLPDGLRKVNDINSAAFIQDTLTSFVQDDADKRVLIQELKGKTVLMQRFLTTRITALTVWLPDRVFENFNIFIENAEKMRILLDSPLNEKIMKFDPDAEQYASLEFYGQCLSQKDIDSYNLIISGIYADDEVKNPGINEIVKEYNQQIRGDKDESPLPKLKKLHKQILMPVEKAFFVRVLSNDSDARSILEKILKDTEMLPSKIIEAMKEADAGDIAVYGSRLHELSHVIYGDHGKLSQIIYDKESKRISELMETLSPKERKESKKRLEGLEEHIRKSTYTFDELNRYAEKNVMAAYIAAVEESCAEIMRKEKDLRTLLSKEDVKIRGNRHNTLIVKNYFNAWTVFRNLIRILRRKSEAEIDSDFYDVLDDSVEVLSLTYKGENLCRSYITKKIGSDLKPEIATYGSALRPNSRWWSPGEKFNVKFHTIVRRDGRLYYFILPKGAKPVELEDMDGDIECLQMRKIPNPTIFLPKLVFKDPEAFFRDNPEADEFVFLSGMKAPVTITRETYEAYRYKLYTVGKLRDGEVSEEEYKRALLQVLTAYKEFLENRMIYADLNFGFKDLEEYKDSSEFIKQVETHNTFMCWAKVSSSQLDDLVKSGNGLLFEIWSERLESYYKYGNEKVLRGYEGVLLSILKDENLVSMRTLLNSRPMLVYRPKESSKPMVVHRDGSRVVDRFDKDGKYIPPEVHDELYRFFNNLLIKEKLGEKARKILDNKKVKVKVLESERVKWSKFYDEQFAVTFSVKKNADCLDTTKDLNAEVMEQYSESNRLILIRNTTDILYYLVLDKNGKVLKQRSLNIINDGARDVDWKERFRQVTKDRNEGYNEWDYSRTSNDLKEVYLNYALKEIAEAVIEYNAILIIEKMSNAFKDKYSFLDDVTFKGFETKLLAKLSDLHFRGIKDGEPCSFTNPLQLCQNDSNKILQDGVIFMVPNSMTRSLDPDTGFIFAINDHNIRTKKAKLNFLSKFDQLKVSSEGCLIMKYSGDSLPTHNTDNRVWNCCCNHPITNYDRETKKVEFIEEPVEELSRVLEENGIETDTELNKLNERENVPGKVVDAIYSLVLNYLRGTVSGVAGQRAVYYSPVTGKKYDISFIQAMNLNRKCDYYRIGSKERGEWTDFVAQLIN

SEQ ID NO: 157 - protein, 1231 aa, Butyrivibrio fibrisolvens
MYYESLTKLYPIKKTIRNELVPIGKTLENIKKNNILEADEDRKIAYIRVKAIMDDYHKRLINEALSGFALIDLDKAANLYLSRSKSADDIESFSRFQDKLRKAIAKRLREHENFGKIGNKDIIPLLQKLSENEDDYNALESFKNFYTYFESYNDVRLNLYSDKEKSSTVAYRLINENLPRFLDNIRAYDAVQKAGITSEELSSEAQDGLFLVNTFNNVLIQDGINTYNEDIGKLNVAINLYNQKNASVQGFRKVPKMKVLYKQILSDREESFIDEFESDTELLDSLESHYANLAKYFGSNKVQLLFTALRESKGVNVYVKNDIAKTSFSNVVFGSWSRIDELINGEYDDNNNRKKDEKYYDKRQKELKKNKSYTIEKIITLSTEDVDVIGKYIEKLESDIDDIRFKGKNFYEAVLCGHDRSKKLSKNKGAVEAIKGYLDSVKDFERDLKLINGSGQELEKNLVVYGEQEAVLSELSGIDSLYNMTRNYLTKKPFSTEKIKLNFNKPTFLDGWDYGNEEAYLGFFMIKEGNYFLAVMDANWNKEFRNIPSVDKSDCYKKVIYKQISSPEKSIQNLMVIDGKTVKKNGRKEKEGIHSGENLILEELKNTYLPKKINDIRKRRSYLNGDTFSKKDLTEFIGYYKQRVIEYYNGYSFYFKSDDDYASFKEFQEDVGRQAYQISYVDVPVSFVDDLINSGKLYLFRVYNKDFSEYSKGRLNLHTLYFKMLFDERNLKNVVYKLNGQAEVFYRPSSIKKEELIVHRAGEEIKNKNPKRAAQKPTRRLDYDIVKDRRYSQDKFMLHTSIIMNFGAEENVSFNDIVNGVLRNEDKVNVIGIDRGERNLLYVVVIDPEGKILEQRSLNCITDSNLDIETDYHRLLDEKESDRKIARRDWTTIENIKELKAGYLSQVVHIVAELVLKYNAIICLEDLNFGFKRGRQKVEKQVYQKFEKMLIDKLNYLVMDKSREQLSPEKISGALNALQLTPDFKSFKVLGKQTGIIYYVPAYLTSKIDPMTGFANLFYVKYENVDKAKEFFSKFDSIKYNKDGKNWNTKGYFEFAFDYKKFTDRAYGRVSEWTVCTVGERIIKFKNKEKNNSYDDKVIDLTNSLKELFDSYKVTYESEVDLKDAILAIDDPAFYRDLTRRLQQTLQMRNSSCDGSRDYIISPVKNSKGEFFCSDNNDDTTPNDADANGAFNIARKGLWVLNEIRNSEEGSKINLAMSNAQWLEYAQDNTI

SEQ ID NO: 158 - protein, 1230 aa, unidentified
  source 1..1230: note = Lachnospiraceae bacterium COE1
MHENNGKIADNFIGIYPVSKTLRFELKPVGKTQEYIEKHGILDEDLKRAGDYKSVKKIIDAYHKYFIDEALNGIQLDGLKNYYELYEKKRDNNEEKEFQKIQMSLRKQIVKRFSEHPQYKYLFKKELIKNVLPEFTKDNAEEQTLVKSFQEFTTYFEGFHQNRKNMYSDEEKSTAIAYRVVHQNLPKYIDNMRIFSMILNTDIRSDLTELFNNLKTKMDITIVEEYFAIDGFNKVVNQKGIDVYNTILGAFSTDDNTKIKGLNEYINLYNQKNKAKLPKLKPLFKQILSDRDKISFIPEQFDSDTEVLEAVDMFYNRLLQFVIENEGQITISKLLTNFSAYDLNKIYVKNDTTISAISNDLFDDWSYISKAVRENYDSENVDKNKRAAAYEEKKEKALSKIKMYSIEELNFFVKKYSCNECHIEGYFERRILEILDKMRYAYESCKILHDKGLINNISLCQDRQAISELKDFLDSIKEVQWLLKPLMIGQEQADKEEAFYTELLRIWEELEPITLLYNKVRNYVTKKPYTLEKVKLNFYKSTLLDGWDKNKEKDNLGIILLKDGQYYLGIMNRRNNKIADDAPLAKTDNVYRKMEYKLLTKVSANLPRIFLKDKYNPSEEMLEKYEKGTHLKGENFCIDDCRELIDFFKKGIKQYEDWGQFDFKFSDTESYDDISAFYKEVEHQGYKITFRDIDETYIDSLVNEGKLYLFQIYNKDFSPYSKGTKNLHTLYWEMLFSQQNLQNIVYKLNGNAEIFYRKASINQKDVVVHKADLPIKNKDPQNSKKESMFDYDIIKDKRFTCDKYQFHVPITMNFKALGENHFNRKVNRLIHDAENMHIIGIDRGERNLIYLCMIDMKGNIVKQISLNEIISYDKNKLEHKRNYHQLLKTREDENKSARQSWQTIHTIKELKEGYLSQVIHVITDLMVEYNAIVVLEDLNFGFKQGRQKFERQVYQKFEKMLIDKLNYLVDKSKGMDEDGGLLHAYQLTDEFKSFKQLGKQSGFLYYIPAWNTSKLDPTTGFVNLFYTKYESVEKSKEFINNFTSILYNQEREYFEFLFDYSAFTSKAEGSRLKWTVCSKGERVETYRNPKKNNEWDTQKIDLTFELKKLFNDYSISLLDGDLREQMGKIDKADFYKKFMKLFALIVQMRNSDEREDKLISPVLNKYGAFFETGKNERMPLDADANGAYNIARKGLWIIEKIKNTDVEQLDKVKLTISNKEWLQYAQEHIL

SEQ ID NO: 159 - protein, 1228 aa, unidentified
  source 1..1228: note = Lachnospiraceae bacterium ND2006
MSKLEKFTNCYSLSKTLRFKAIPVGKTQENIDNKRLLVEDEKRAEDYKGVKKLLDRYYLSFINDVLHSIKLKNLNNYISLFRKKTRTEKENKELENLEINLRKEIAKAFKGNEGYKSLFKKDIIETILPEFLDDKDEIALVNSFNGFTTAFTGFFDNRENMFSEEAKSTSIAFRCINENLTRYISNMDIFEKVDAIFDKHEVQEIKEKILNSDYDVEDFFEGEFFNFVLTQEGIDVYNAIIGGFVTESGEKIKGLNEYINLYNQKTKQKLPKFKPLYKQVLSDRESLSFYGEGYTSDEEVLEVFRNTLNKNSEIFSSIKKLEKLFKNFDEYSSAGIFVKNGPAISTISKDIFGEWNVIRDKWNAEYDDIHLKKKAVVTEKYEDDRRKSFKKIGSFSLEQLQEYADADLSVVEKLKEIIIQKVDEIYKVYGSSEKLFDADFVLEKSLKKNDAVVAIMKDLLDSVKSFENYIKAFFGEGKETNRDESFYGDFVLAYDILLKVDHIYDAIRNYVTQKPYSKDKFKLYFQNPQFMGGWDKDKETDYRATILRYGSKYYLAIMDKKYAKCLQKIDKDDVNGNYEKINYKLLPGPNKMLPKVFFSKKWMAYYNPSEDIQKIYKNGTFKKGDMFNLNDCHKLIDFFKDSISRYPKWSNAYDFNFSETEKYKDIAGFYREVEEQGYKVSFESASKKEVDKLVEEGKLYMFQIYNKDFSDKSHGTPNLHTMYFKLLFDENNHGQIRLSGGAELFMRRASLKKEELVVHPANSPIANKNPDNPKKTTTLSYDVYKDKRFSEDQYELHIPIAINKCPKNIFKINTEVRVLLKHDDNPYVIGIDRGERNLLYIVVVDGKGNIVEQYSLNEIINNFNGIRIKTDYHSLLDKKEKERFEARQNWTSIENIKELKAGYISQVVHKICELVEKYDAVIALEDLNSGFKNSRVKVEKQVYQKFEKMLIDKLNYMVDKKSNPCATGGALKGYQITNKFESFKSMSTQNGFIFYIPAWLTSKIDPSTGFVNLLKTKYTSIADSKKFISSFDRIMYVPEEDLFEFALDYKNFSRTDADYIKKWKLYSYGNRIRIFRNPKKNNVFDWEEVCLTSAYKELFNKYGINYQQGDIRALLCEQSDKAFYSSFMALMSLMLQMRNSITGRTDVDFLISPVKNSDGIFYDSRNYEAQENAILPKNADANGAYNIARKVLWAIGQFKKAEDEKLDKVKIAISNKEWLEYAQTSVKH

SEQ ID NO: 160 - protein, 1246 aa, unidentified
  source 1..1246: note = Lachnospiraceae bacterium ND2006
MLKNVGIDRLDVEKGRKNMSKLEKFTNCYSLSKTLRFKAIPVGKTQENIDNKRLLVEDEKRAEDYKGVKKLLDRYYLSFINDVLHSIKLKNLNNYISLFRKKTRTEKENKELENLEINLRKEIAKAFKGNEGYKSLFKKDIIETILPEFLDDKDEIALVNSFNGFTTAFTGFFDNRENMFSEEAKSTSIAFRCINENLTRYISNMDIFEKVDAIFDKHEVQEIKEKILNSDYDVEDFFEGEFFNFVLTQEGIDVYNAIIGGFVTESGEKIKGLNEYINLYNQKTKQKLPKFKPLYKQVLSDRESLSFYGEGYTSDEEVLEVFRNTLNKNSEIFSSIKKLEKLFKNFDEYSSAGIFVKNGPAISTISKDIFGEWNVIRDKWNAEYDDIHLKKKAVVTEKYEDDRRKSFKKIGSFSLEQLQEYADADLSVVEKLKEIIIQKVDEIYKVYGSSEKLFDADFVLEKSLKKNDAVVAIMKDLLDSVKSFENYIKAFFGEGKETNRDESFYGDFVLAYDILLKVDHIYDAIRNYVTQKPYSKDKFKLYFQNPQFMGGWDKDKETDYRATILRYGSKYYLAIMDKKYAKCLQKIDKDDVNGNYEKINYKLLPGPNKMLPKVFFSKKWMAYYNPSEDIQKIYKNGTFKKGDMFNLNDCHKLIDFFKDSISRYPKWSNAYDFNFSETEKYKDIAGFYREVEEQGYKVSFESASKKEVDKLVEEGKLYMFQIYNKDFSDKSHGTPNLHTMYFKLLFDENNHGQIRLSGGAELFMRRASLKKEELVVHPANSPIANKNPDNPKKTTTLSYDVYKDKRFSEDQYELHIPIAINKCPKNIFKINTEVRVLLKHDDNPYVIGIDRGERNLLYIVVVDGKGNIVEQYSLNEIINNFNGIRIKTDYHSLLDKKEKERFEARQNWTSIENIKELKAGYISQVVHKICELVEKYDAVIALEDLNSGFKNSRVKVEKQVYQKFEKMLIDKLNYMVDKKSNPCATGGALKGYQITNKFESFKSMSTQNGFIFYIPAWLTSKIDPSTGFVNLLKTKYTSIADSKKFISSFDRIMYVPEEDLFEFALDYKNFSRTDADYIKKWKLYSYGNRIRIFRNPKKNNVFDWEEVCLTSAYKELFNKYGINYQQGDIRALLCEQSDKAFYSSFMALMSLMLQMRNSITGRTDVDFLISPVKNSDGIFYDSRNYEAQENAILPKNADANGAYNIARKVLWAIGQFKKAEDEKLDKVKIAISNKEWLEYAQTSVKH

SEQ ID NO: 161 - protein, 1227 aa, unidentified
  source 1..1227: note = Candidatus Methanomethylophilus alvus
MDAKEFTGQYPLSKTLRFELRPIGRTWDNLEASGYLAEDRHRAECYPRAKELLDDNHRAFLNRVLPQIDMDWHPIAEAFCKVHKNPGNKELAQDYNLQLSKRRKEISAYLQDADGYKGLFAKPALDEAMKIAKENGNESDIEVLEAFNGFSVYFTGYHESRENIYSDEDMVSVAYRITEDNFPRFVSNALIFDKLNESHPDIISEVSGNLGVDDIGKYFDVSNYNNFLSQAGIDDYNHIIGGHTTEDGLIQAFNVVLNLRHQKDPGFEKIQFKQLYKQILSVRTSKSYIPKQFDNSKEMVDCICDYVSKIEKSETVERALKLVRNISSFDLRGIFVNKKNLRILSNKLIGDWDAIETALMHSSSSENDKKSVYDSAEAFTLDDIFSSVKKFSDASAEDIGNRAEDICRVISETAPFINDLRAVDLDSLNDDGYEAAVSKIRESLEPYMDLFHELEIFSVGDEFPKCAAFYSELEEVSEQLIEIIPLFNKARSFCTRKRYSTDKIKVNLKFPTLADGWDLNKERDNKAAILRKDGKYYLAILDMKKDLSSIRTSDEDESSFEKMEYKLLPSPVKMLPKIFVKSKAAKEKYGLTDRMLECYDKGMHKSGSAFDLGFCHELIDYYKRCIAEYPGWDVFDFKFRETSDYGSMKEFNEDVAGAGYYMSLRKIPCSEVYRLLDEKSIYLFQIYNKDYSENAHGNKNMHTMYWEGLFSPQNLESPVFKLSGGAELFFRKSSIPNDAKTVHPKGSVLVPRNDVNGRRIPDSIYRELTRYFNRGDCRISDEAKSYLDKVKTKKADHDIVKDRRFTVDKMMFHVPIAMNFKAISKPNLNKKVIDGIIDDQDLKIIGIDRGERNLIYVTMVDRKGNILYQDSLNILNGYDYRKALDVREYDNKEARRNWTKVEGIRKMKEGYLSLAVSKLADMIIENNAIIVMEDLNHGFKAGRSKIEKQVYQKFESMLINKLGYMVLKDKSIDQSGGALHGYQLANHVTTLASVGKQCGVIFYIPAAFTSKIDPTTGFADLFALSNVKNVASMREFFSKMKSVIYDKAEGKFAFTFDYLDYNVKSECGRTLWTVYTVGERFTYSRVNREYVRKVPTDIIYDALQKAGISVEGDLRDRIAESDGDTLKSIFYAFKYALDMRVENREEDYIQSPVKNASGEFFCSKNAGKSLPQDSDANGAYNIALKGILQLRMLSEQYDPNAESIRLPLITNKAWLTFMQSGMKTWKN

SEQ ID NO: 162 - protein, 1224 aa, unidentified
  source 1..1224: note = Lachnospiraceae bacterium MC2017
MGLYDGFVNRYSVSKTLRFELIPQGRTREYIETNGILSDDEERAKDYKTIKRLIDEYHKDYISRCLKNVNISCLEEYYHLYNSSNRDKRHEELDALSDQMRGEIASFLTGNDEYKEQKSRDIIINERIINFASTDEELAAVKRFRKFTSYFTGFFTNRENMYSAEKKSTAIAHRIIDVNLPKYVDNIKAFNTAIEAGVFDIAEFESNFKAITDEHEVSDLLDITKYSRFIRNEDIIIYNTLLGGISMKDEKIQGLNELINLHNQKHPGKKVPLLKVLYKQILGDSQTHSFVDDQFEDDQQVINAVKAVTDTFSETLLGSLKIIINNIGHYDLDRIYIKAGQDITTLSKRALNDWHIITECLESEYDDKFPKNKKSDTYEEMRNRYVKSFKSFSIGRLNSLVTTYTEQACFLENYLGSFGGDTDKNCLTDFTNSLMEVEHLLNSEYPVTNRLITDYESVRILKRLLDSEMEVIHFLKPLLGNGNESDKDLVFYGEFEAEYEKLLPVIKVYNRVRNYLTRKPFSTEKIKLNFNSPTLLCGWSQSKEKEYMGVILRKDGQYYLGIMTPSNKKIFSEAPKPDEDCYEKMVLRYIPHPYQMLPKVFFSKSNIAFFNPSDEILRIKKQESFKKGKSFNRDDCHKFIDFYKDSINRHEEWRKFNFKFSDTDSYEDISRFYKEVENQAFSMSFTKIPTVYIDSLVDEGKLYLFKLHNKDFSEHSKGKPNLHTVYWNALFSEYNLQNTVYQLNGSAEIFFRKASIPENERVIHKKNVPITRKVAELNGKKEVSVFPYDIIKNRRYTVDKFQFHVPLKMNFKADEKKRINDDVIEAIRSNKGIHVIGIDRGERNLLYLSLINEEGRIIEQRSLNIIDSGEGHTQNYRDLLDSREKDREKARENWQEIQEIKDLKTGYLSQAIHTITKWMKEYNAIIVLEDLNDRFTNGRKKVEKQVYQKFEKMLIDKLNYYVDKDEEFDRMGGTHRALQLTEKFESFQKLGRQTGFIFYVPAWNTSKLDPTTGFVDLLYPKYKSVDATKDFIKKFDFIRFNSEKNYFEFGLHYSNFTERAIGCRDEWILCSYGNRIVNFRNAAKNNSWDYKEIDITKQLLDLFEKNGIDVKQENLIDSICEMKDKPFFKSLIANIKLILQIRNSASGTDIDYMISPAMNDRGEFFDTRKGLQQLPLDADANGAYNIAKKGLWIVDQIRNTTGNNVKMAMSNREWMHFAQESRLA

SEQ ID NO: 163 - protein, 1214 aa, unidentified
  source 1..1214: note = Candidate division WS6 bacterium GW2011_GWA2_37_6
MKNVFGGFTNLYSLTKTLRFELKPTSKTQKLMKRNNVIQTDEEIDKLYHDEMKPILDEIHRRFINDALAQKIFISASLDNFLKVVKNYKVESAKKNIKQNQVKLLQKEITIKTLGLRREVVSGFITVSKKWKDKYVGLGIKLKGDGYKVLTEQAVLDILKIEFPNKAKYIDKFRGFWTYFSGFNENRKNYYSEEDKATSIANRIVNENLSRYIDNIIAFEEILQKIPNLKKFKQDLDITSYNYYLNQAGIDKYNKIIGGYIVDKDKKIQGINEKVNLYTQQTKKKLPKLKFLFKQIGSERKGFGIFEIKEGKEWEQLGDLFKLQRTKINSNGREKGLFDSLRTMYREFFDEIKRDSNSQARYSLDKIYFNKASVNTISNSWFTNWNKFAELLNIKEDKKNGEKKIPEQISIEDIKDSLSIIPKENLEELFKLTNREKHDRTRFFGSNAWVTFLNIWQNEIEESFNKLEEKEKDFKKNAAIKFQKNNLVQKNYIKEVCDRMLAIERMAKYHLPKDSNLSREEDFYWIIDNLSEQREIYKYYNAFRNYISKKPYNKSKMKLNFENGNLLGGWSDGQERNKAGVILRNGNKYYLGVLINRGIFRTDKINNEIYRTGSSKWERLILSNLKFQTLAGKGFLGKHGVSYGNMNPEKSVPSLQKFIRENYLKKYPQLTEVSNTKFLSKKDFDAAIKEALKECFTMNFINIAENKLLEAEDKGDLYLFEITNKDFSGKKSGKDNIHTIYWKYLFSESNCKSPIIGLNGGAEIFFREGQKDKLHTKLDKKGKKVFDAKRYSEDKLFFHVSITINYGKPKNIKFRDIINQLITSMNVNIIGIDRGEKHLLYYSVIDSNGIILKQGSLNKIRVGDKEVDFNKKLTERANEMKKARQSWEQIGNIKNFKEGYLSQAIHEIYQLMIKYNAIIVLEDLNTEFKAKRLSKVEKSVYKKFELKLARKLNHLILKDRNTNEIGGVLKAYQLTPTIGGGDVSKFEKAKQWGMMFYVRANYTSTTDPVTGWRKHLYISNFSNNSVIKSFFDPTNRDTGIEIFYSGKYRSWGFRYVQKETGKKWELFATKELERFKYNQTTKLCEKINLYDKFEELFKGIDKSADIYSQLCNVLDFRWKSLVYLWNLLNQIRNVDKNAEGNKNDFIQSPVYPFFDSRKTDGKTEPINGDANGALNIARKGLMLVERIKNNPEKYEQLIRDTEWDAWIQNFNKVN

SEQ ID NO: 164 - protein, 1206 aa, unidentified
  source 1..1206: note = Lachnospiraceae bacterium MA2020
MYYESLTKQYPVSKTIRNELIPIGKTLDNIRQNNILESDVKRKQNYEHVKGILDEYHKQLINEALDNCTLPSLKIAAEIYLKNQKEVSDREDFNKTQDLLRKEVVEKLKAHENFTKIGKKDILDLLEKLPSISEDDYNALESFRNFYTYFTSYNKVRENLYSDKEKSSTVAYRLINENFPKFLDNVKSYRFVKTAGILADGLGEEEQDSLFIVETFNKTLTQDGIDTYNSQVGKINSSINLYNQKNQKANGFRKIPKMKMLYKQILSDREESFIDEFQSDEVLIDNVESYGSVLIESLKSSKVSAFFDALRESKGKNVYVKNDLAKTAMSNIVFENWRTFDDLLNQEYDLANENKKKDDKYFEKRQKELKKNKSYSLEHLCNLSEDSCNLIENYIHQISDDIENIIINNETFLRIVINEHDRSRKLAKNRKAVKAIKDFLDSIKVLERELKLINSSGQELEKDLIVYSAHEELLVELKQVDSLYNMTRNYLTKKPFSTEKVKLNFNRSTLLNGWDRNKETDNLGVLLLKDGKYYLGIMNTSANKAFVNPPVAKTEKVFKKVDYKLLPVPNQMLPKVFFAKSNIDFYNPSSEIYSNYKKGTHKKGNMFSLEDCHNLIDFFKESISKHEDWSKFGFKFSDTASYNDISEFYREVEKQGYKLTYTDIDETYINDLIERNELYLFQIYNKDFSMYSKGKLNLHTLYFMMLFDQRNIDDVVYKLNGEAEVFYRPASISEDELIIHKAGEEIKNKNPNRARTKETSTFSYDIVKDKRYSKDKFTLHIPITMNFGVDEVKRFNDAVNSAIRIDENVNVIGIDRGERNLLYVVVIDSKGNILEQISLNSIINKEYDIETDYHALLDEREGGRDKARKDWNTVENIRDLKAGYLSQVVNVVAKLVLKYNAIICLEDLNFGFKRGRQKVEKQVYQKFEKMLIDKLNYLVIDKSREQTSPKELGGALNALQLTSKFKSFKELGKQSGVIYYVPAYLTSKIDPTTGFANLFYMKCENVEKSKRFFDGFDFIRFNALENVFEFGFDYRSFTQRACGINSKWTVCTNGERIIKYRNPDKNNMFDEKVVVVTDEMKNLFEQYKIPYEDGRNVKDMIISNEEAEFYRRLYRLLQQTLQMRNSTSDGTRDYIISPVKNKREAYFNSELSDGSVPKDADANGAYNIARKGLWVLEQIRQKSEGEKINLAMTNAEWLEYAQTHLL

SEQ ID NO: 165 - protein, 1206 aa, Butyrivibrio sp.
  source 1..1206: note = Butyrivibrio sp. NC3005
MYYQNLTKKYPVSKTIRNELIPIGKTLENIRKNNILESDVKRKQDYEHVKGIMDEYHKQLINEALDNYMLPSLNQAAEIYLKKHVDVEDREEFKKTQDLLRREVTGRLKEHENYTKIGKKDILDLLEKLPSISEEDYNALESFRNFYTYFTSYNKVRENLYSDEEKSSTVAYRLINENLPKFLDNIKSYAFVKAAGVLADCIEEEEQDALFMVETFNMTLTQEGIDMYNYQIGKVNSAINLYNQKNHKVEEFKKIPKMKVLYKQILSDREEVFIGEFKDDETLLSSIGAYGNVLMTYLKSEKINIFFDALRESEGKNVYVKNDLSKTTMSNIVFGSWSAFDELLNQEYDLANENKKKDDKYFEKRQKELKKNKSYTLEQMSNLSKEDISPIENYIERISEDIEKICIYNGEFEKIVVNEHDSSRKLSKNIKAVKVIKDYLDSIKELEHDIKLINGSGQELEKNLVVYVGQEEALEQLRPVDSLYNLTRNYLTKKPFSTEKVKLNFNKSTLLNGWDKNKETDNLGILFFKDGKYYLGIMNTTANKAFVNPPAAKTENVFKKVDYKLLPGSNKMLPKVFFAKSNIGYYNPSTELYSNYKKGTHKKGPSFSIDDCHNLIDFFKESIKKHEDWSKFGFEFSDTADYRDISEFYREVEKQGYKLTFTDIDESYINDLIEKNELYLFQIYNKDFSEYSKGKLNLHTLYFMMLFDQRNLDNVVYKLNGEAEVFYRPASIAENELVIHKAGEGIKNKNPNRAKVKETSTFSYDIVKDKRYSKYKFTLHIPITMNFGVDEVRRFNDVINNALRTDDNVNVIGIDRGERNLLYVVVINSEGKILEQISLNSIINKEYDIETNYHALLDEREDDRNKARKDWNTIENIKELKTGYLSQVVNVVAKLVLKYNAIICLEDLNFGFKRGRQKVEKQVYQKFEKMLIEKLNYLVIDKSREQVSPEKMGGALNALQLTSKFKSFAELGKQSGIIYYVPAYLTSKIDPTTGFVNLFYIKYENIEKAKQFFDGFDFIRFNKKDDMFEFSFDYKSFTQKACGIRSKWIVYTNGERIIKYPNPEKNNLFDEKVINVTDEIKGLFKQYRIPYENGEDIKEIIISKAEADFYKRLFRLLHQTLQMRNSTSDGTRDYIISPVKNDRGEFFCSEFSEGTMPKDADANGAYNIARKGLWVLEQIRQKDEGEKVNLSMTNAEWLKYAQLHLL

SEQ ID NO: 166 - protein, 1206 aa, unidentified
  source 1..1206: note = Lachnospiraceae bacterium NC2008
MENYYDSLTRQYPVTKTIRQELKPVGKTLENIKNAEIIEADKQKKEAYVKVKELMDEFHKSIIEKSLVGIKLDGLSEFEKLYKIKTKTDEDKNRISELFYYMRKQIADALKNSRDYGYVDNKDLIEKILPERVKDENSLNALSCFKGFTTYFTDYYKNRKNIYSDEEKHSTVGYRCINENLLIFMSNIEVYQIYKKANIKNDNYDEETLDKTFMIESFNECLTQSGVEAYNSVVASIKTATNLYIQKNNKEENFVRVPKMKVLFKQILSDRTSLFDGLIIESDDELLDKLCSFSAEVDKFLPINIDRYIKTLMDSNNGTGIYVKNDSSLTTLSNYLTDSWSSIRNAFNENYDAKYTGKVNDKYEEKREKAYKSNDSFELNYIQNLLGINVIDKYIERINFDIKEICEAYKEMTKNCFEDHDKTKKLQKNIKAVASIKSYLDSLKNIERDIKLLNGTGLESRNEFFYGEQSTVLEEITKVDELYNITRNYLTKKPFSTEKMKLNFNNPQLLGGWDVNKERDCYGVILIKDNNYYLGIMDKSANKSFLNIKESKNENAYKKVNCKLLPGPNKMFPKVFFAKSNIDYYDPTHEIKKLYDKGTFKKGNSFNLEDCHKLIDFYKESIKKNDDWKNFNFNFSDTKDYEDISGFFREVEAQNYKITYTNVSCDFIESLVDEGKLYLFQIYNKDFSEYATGNLNLHTLYLKMLFDERNLKDLCIKMNGEAEVFYRPASILDEDKVVHKANQKITNKNTNSKKKESIFSYDIVKDKRYTVDKFFIHLPITLNYKEQNVSRFNDYIREILKKSKNIRVIGIDRGERNLLYVVVCDSDGSILYQRSINEIVSGSHKTDYHKLLDNKEKERLSSRRDWKTIENIKDLKAGYMSQVVNEIYNLILKYNAIVVLEDLNIGFKNGRKKVEKQVYQNFEKALIDKLNYLCIDKTREQLSPSSPGGVLNAYQLTAKFESFEKIGKQTGCIFYVPAYLTSQIDPTTGFVNLFYQKDTSKQGLQLFFRKFKKINFDKVASNFEFVFDYNDFTNKAEGTKTNWTISTQGTRIAKYRSDDANGKWISRTVHPTDIIKEALNREKINYNDGHDLIDEIVSIEKSAVLKEIYYGFKLTLQLRNSTLANEEEQEDYIISPVKNSSGNYFDSRITSKELPCDADANGAYNIARKGLWALEQIRNSENVSKVKLAISNKEWFEYTQNNIPSL

SEQ ID NO: 167 - protein, 1222 aa, Oribacterium sp.
  source 1..1222: note = Oribacterium sp. NK2B42
METEILKYDFFEREGKYMYYDGLTKQYALSKTIRNELVPIGKTLDNIKKNRILEADIKRKSDYEHVKKLMDMYHKKIINEALDNFKLSVLEDAADIYFNKQNDERDIDAFLKIQDKLRKEIVEQLKGHTDYSKVGNKDFLGLLKAASTEEDRILIESFDNFYTYFTSYNKVRSNLYSAEDKSSTVAYRLINENLPKFFDNIKAYRTVRNAGVISGDMSIVEQDELFEVDTFNHTLTQYGIDTYNHMIGQLNSAINLYNQKMHGAGSFKKLPKMKELYKQLLTEREEEFIEEYTDDEVLITSVHNYVSYLIDYLNSDKVESFFDTLRKSDGKEVFIKNDVSKTTMSNILFDNWSTIDDLINHEYDSAPENVKKTKDDKYFEKRQKDLKKNKSYSLSKIAALCRDTTILEKYIRRLVDDIEKIYTSNNVFSDIVLSKHDRSKKLSKNTNAVQAIKNMLDSIKDFEHDVMLINGSGQEIKKNLNVYSEQEALAGILRQVDHIYNLTRNYLTKKPFSTEKIKLNFNRPTFLDGWDKNKEEANLGILLIKDNRYYLGIMNTSSNKAFVNPPKAISNDIYKKVDYKLLPGPNKMLPKVFFATKNIAYYAPSEELLSKYRKGTHKKGDSFSIDDCRNLIDFFKSSINKNTDWSTFGFNFSDTNSYNDISDFYREVEKQGYKLSFTDIDACYIKDLVDNNELYLFQIYNKDFSPYSKGKLNLHTLYFKMLFDQRNLDNVVYKLNGEAEVFYRPASIESDEQIIHKSGQNIKNKNQKRSNCKKTSTFDYDIVKDRRYCKDKFMLHLPITVNFGTNESGKFNELVNNAIRADKDVNVIGIDRGERNLLYVVVVDPCGKIIEQISLNTIVDKEYDIETDYHQLLDEKEGSRDKARKDWNTIENIKELKEGYLSQVVNIIAKLVLKYDAIICLEDLNFGFKRGRQKVEKQVYQKFEKMLIDKMNYLVLDKSRKQESPQKPGGALNALQLTSAFKSFKELGKQTGIIYYVPAYLTSKIDPTTGFANLFYIKYESVDKARDFFSKFDFIRYNQMDNYFEFGFDYKSFTERASGCKSKWIACTNGERIVKYRNSDKNNSFDDKTVILTDEYRSLFDKYLQNYIDEDDLKDQILQIDSADFYKNLIKLFQLTLQMRNSSSDGKRDYIISPVKNYREEFFCSEFSDDTFPRDADANGAYNIARKGLWVIKQIRETKSGTKINLAMSNSEWLEYAQCNLL

SEQ ID NO: 168 - protein, 1205 aa, Pseudobutyrivibrio ruminis
MYYQNLTKMYPISKTLRNELIPVGKTLENIRKNGILEADIQRKADYEHVKKLMDNYHKQLINEALQGVHLSDLSDAYDLYFNLSKEKNSVDAFSKCQDKLRKEIVSLLKNHENFPKIGNKEIIKLLQSLYDNDTDYKALDSFSNFYTYFSSYNEVRKNLYSDEEKSSTVAYRLINENLPKFLDNIKAYAIAKKAGVRAEGLSEEDQDCLFIIETFERTLTQDGIDNYNAAIGKLNTAINLFNQQNKKQEGFRKVPQMKCLYKQILSDREEAFIDEFSDDEDLITNIESFAENMNVFLNSEIITDFKIALVESDGSLVYIKNDVSKTSFSNIVFGSWNAIDEKLSDEYDLANSKKKKDEKYYEKRQKELKKNKSYDLETIIGLFDDNSDVIGKYIEKLESDITAIAEAKNDFDEIVLRKHDKNKSLRKNTNAVEAIKSYLDTVKDFERDIKLINGSGQEVEKNLVVYAEQENILAEIKNVDSLYNMSRNYLTQKPFSTEKFKLNFNRATLLNGWDKNKETDNLGILFEKDGMYYLGIMNTKANKIFVNIPKATSNDVYHKVNYKLLPGPNKMLPKVFFAQSNLDYYKPSEELLAKYKAGTHKKGDNFSLEDCHALIDFFKASIEKHPDWSSFGFEFSETCTYEDLSGFYREVEKQGYKITYTDVDADYITSLVERDELYLFQIYNKDFSPYSKGNLNLHTIYLQMLFDQRNLNNVVYKLNGEAEVFYRPASINDEEVIIHKAGEEIKNKNSKRAVDKPTSKFGYDIIKDRRYSKDKFMLHIPVTMNFGVDETRRFNDVVNDALRNDEKVRVIGIDRGERNLLYVVVVDTDGTILEQISLNSIINNEYSIETDYHKLLDEKEGDRDRARKNWTTIENIKELKEGYLSQVVNVIAKLVLKYNAIICLEDLNFGFKRGRQKVEKQVYQKFEKMLIDKLNYLVIDKSRKQDKPEEFGGALNALQLTSKFTSFKDMGKQTGIIYYVPAYLTSKIDPTTGFANLFYVKYENVEKAKEFFSRFDSISYNNESGYFEFAFDYKKFTDRACGARSQWTVCTYGERIIKFRNTEKNNSFDDKTIVLSEEFKELFSIYGISYEDGAELKNKIMSVDEADFFRSLTRLFQQTMQMRNSSNDVTRDYIISPIMNDRGEFFNSEACDASKPKDADANGAFNIARKGLWVLEQIRNTPSGDKLNLAMSNAEWLEYAQRNQI

SEQ ID NO: 169 - protein, 1154 aa, Proteocatella sphenisci
MENFKNLYPINKTLRFELRPYGKTLENFKKSGLLEKDAFKANSRRSMQAIIDEKFKETIEERLKYTEFSECDLGNMTSKDKKITDKAATNLKKQVILSFDDEIFNNYLKPDKNIDALFKNDPSNPVISTFKGFTTYFVNFFEIRKHIFKGESSGSMAYRIIDENLTTYLNNIEKIKKLPEELKSQLEGIDQIDKLNNYNEFITQSGITHYNEIIGGISKSENVKIQGINEGINLYCQKNKVKLPRLTPLYKMILSDRVSNSFVLDTIENDTELIEMISDLINKTEISQDVIMSDIQNIFIKYKQLGNLPGISYSSIVNAICSDYDNNFGDGKRKKSYENDRKKHLETNVYSINYISELLTDTDVSSNIKMRYKELEQNYQVCKENFNATNWMNIKNIKQSEKTNLIKDLLDILKSIQRFYDLFDIVDEDKNPSAEFYTWLSKNAEKLDFEFNSVYNKSRNYLTRKQYSDKKIKLNFDSPTLAKGWDANKEIDNSTIIMRKFNNDRGDYDYFLGIWNKSTPANEKIIPLEDNGLFEKMQYKLYPDPSKMLPKQFLSKIWKAKHPTTPEFDKKYKEGRHKKGPDFEKEFLHELIDCFKHGLVNHDEKYQDVFGFNLRNTEDYNSYTEFLEDVERCNYNLSFNKIADTSNLINDGKLYVFQIWSKDFSIDSKGTKNLNTIYFESLFSEENMIEKMFKLSGEAEIFYRPASLNYCEDIIKKGHHHAELKDKFDYPIIKDKRYSQDKFFFHVPMVINYKSEKLNSKSLNNRTNENLGQFTHIIGIDRGERHLIYLTVVDVSTGEIVEQKHLDEIINTDTKGVEHKTHYLNKLEEKSKTRDNERKSWEAIETIKELKEGYISHVINEIQKLQEKYNALIVMENLNYGFKNSRIKVEKQVYQKFETALIKKFNYIIDKKDPETYIHGYQLTNPITTLDKIGNQSGIVLYIPAWNTSKIDPVTGFVNLLYADDLKYKNQEQAKSFIQKIDNIYFENGEFKFDIDFSKWNNRYSISKTKWTLTSYGTRIQTFRNPQKNNKWDSAEYDLTEEFKLILNIDGTLKSQDVETYKKFMSLFKLMLQLRNSVTGTDIDYMISPVTDKTGTHFDSRENIKNLPADADANGAYNIARKGIMAIENIMNGISDPLKISNEDYLKYIQNQQE

SEQ ID NO: 170 - protein, 1171 aa, Proteocatella sphenisci
MIILYISTSNMNMEGVFMENFKNLYPINKTLRFELRPYGKTLENFKKSGLLEKDAFKANSRRSMQAIIDEKFKETIEERLKYTEFSECDLGNMTSKDKKITDKAATNLKKQVILSFDDEIFNNYLKPDKNIDALFKNDPSNPVISTFKGFTTYFVNFFEIRKHIFKGESSGSMAYRIIDENLTTYLNNIEKIKKLPEELKSQLEGIDQIDKLNNYNEFITQSGITHYNEIIGGISKSENVKIQGINEGINLYCQKNKVKLPRLTPLYKMILSDRVSNSFVLDTIENDTELIEMISDLINKTEISQDVIMSDIQNIFIKYKQLGNLPGISYSSIVNAICSDYDNNFGDGKRKKSYENDRKKHLETNVYSINYISELLTDTDVSSNIKMRYKELEQNYQVCKENFNATNWMNIKNIKQSEKTNLIKDLLDILKSIQRFYDLFDIVDEDKNPSAEFYTWLSKNAEKLDFEFNSVYNKSRNYLTRKQYSDKKIKLNFDSPTLAKGWDANKEIDNSTIIMRKFNNDRGDYDYFLGIWNKSTPANEKIIPLEDNGLFEKMQYKLYPDPSKMLPKQFLSKIWKAKHPTTPEFDKKYKEGRHKKGPDFEKEFLHELIDCFKHGLVNHDEKYQDVFGFNLRNTEDYNSYTEFLEDVERCNYNLSFNKIADTSNLINDGKLYVFQIWSKDFSIDSKGTKNLNTIYFESLFSEENMIEKMFKLSGEAEIFYRPASLNYCEDIIKKGHHHAELKDKFDYPIIKDKRYSQDKFFFHVPMVINYKSEKLNSKSLNNRTNENLGQFTHIIGIDRGERHLIYLTVVDVSTGEIVEQKHLDEIINTDTKGVEHKTHYLNKLEEKSKTRDNERKSWEAIETIKELKEGYISHVINEIQKLQEKYNALIVMENLNYGFKNSRIKVEKQVYQKFETALIKKFNYIIDKKDPETYIHGYQLTNPITTLDKIGNQSGIVLYIPAWNTSKIDPVTGFVNLLYADDLKYKNQEQAKSFIQKIDNIYFENGEFKFDIDFSKWNNRYSISKTKWTLTSYGTRIQTFRNPQKNNKWDSAEYDLTEEFKLILNIDGTLKSQDVETYKKFMSLFKLMLQLRNSVTGTDIDYMISPVTDKTGTHFDSRENIKNLPADADANGAYNIARKGIMAIENIMNGISDPLKISNEDYLKYIQNQQE

SEQ ID NO: 171 - protein, 1263 aa, Eubacterium rectale
MNNGTNNFQNFIGISSLQKTLRNALIPTETTQQFIVKNGIIKEDELRGENRQILKDIMDDYYRGFISETLSSIDDIDWTSLFEKMEIQLKNGDNKDTLIKEQTEYRKAIHKKFANDDRFKNMFSAKLISDILPEFVIHNNNYSASEKEEKTQVIKLFSRFATSFKDYFKNRANCFSADDISSSSCHRIVNDNAEIFFSNALVYRRIVKSLSNDDINKISGDMKDSLKEMSLEEIYSYEKYGEFITQEGISFYNDICGKVNSFMNLYCQKNKENKNLYKLQKLHKQILCIADTSYEVPYKFESDEEVYQSVNGFLDNISSKHIVERLRKIGDNYNGYNLDKIYIVSKFYESVSQKTYRDWETINTALEIHYNNILPGNGKSKADKVKKAVKNDLQKSITEINELVSNYKLCSDDNIKAETYIHEISHILNNFEAQELKYNPEIHLVESELKASELKNVLDVIMNAFHWCSVFMTEELVDKDNNFYAELEEIYDEIYPVISLYNLVRNYVTQKPYSTKKIKLNFGIPTLADGWSKSKEYSNNAIILMRDNLYYLGIFNAKNKPDKKIIEGNTSENKGDYKKMIYNLLPGPNKMIPKVFLSSKTGVETYKPSAYILEGYKQNKHIKSSKDFDITFCHDLIDYFKNCIAIHPEWKNFGFDFSDTSTYEDISGFYREVELQGYKIDWTYISEKDIDLLQEKGQLYLFQIYNKDFSKKSTGNDNLHTMYLKNLFSEENLKDIVLKLNGEAEIFFRKSSIKNPIIHKKGSILVNRTYEAEEKDQFGNIQIVRKNIPENIYQELYKYFNDKSDKELSDEAAKLKNVVGHHEAATNIVKDYRYTYDKYFLHMPITINFKANKTGFINDRILQYIAKEKDLHVIGIDRGERNLIYVSVIDTCGNIVEQKSFNIVNGYDYQIKLKQQEGARQIARKEWKEIGKIKEIKEGYLSLVIHEISKMVIKYNAIIAMEDLSYGFKKGRFKVERQVYQKFETMLINKLNYLVFKDISITENGGLLKGYQLTYIPDKLKNVGHQCGCIFYVPAAYTSKIDPTTGFVNIFKFKDLTVDAKREFIKKFDSIRYDSEKNLFCFTFDYNNFITQNTVMSKSSWSVYTYGVRIKRRFVNGRFSNESDTIDITKDMEKTLEMTDINWRDGHDLRQDIIDYEIVQHIFEIFRLTVQMRNSLSELEDRDYDRLISPVLNENNIFYDSAKAGDALPKDADANGAYCIALKGLYEIKQITENWKEDGKFSRDKLKISNKDWFDFIQNKRYL

SEQ ID NO: 172 - protein, 1263 aa, Eubacterium rectale
MNNGTNNFQNFIGISSLQKTLRNALIPTETTQQFIVKNGIIKEDELRGENRQILKDIMDDYYRGFISETLSSIDDIDWTSLFEKMEIQLKNGDNKDTLIKEQAEKRKAIYKKFADDDRFKNMFSAKLISDILPEFVIHNNNYSASEKEEKTQVIKLFSRFATSFKDYFKNRANCFSADDISSSSCHRIVNDNAEIFFSNALVYRRIVKNLSNDDINKISGDMKDSLKEMSLDEIYSYEKYGEFITQEGISFYNDICGKVNSFMNLYCQKNKENKNLYKLRKLHKQILCIADTSYEVPYKFESDEEVYQSVNGFLDNISSKHIVERLRKIGDNYNGYNLDKIYIVSRFYESVSQKTYRDWETINTALEIHYNNILPGNGKSKADKVKKAVKNDLQKSITEINELVSNYKLCPDDNIKAETYIHEISHILNNFEAQELKYNPEIHLVESELKASELKNVLDVIMNAFHWCSVFMTEELVDKDNNFYAELEEIYDEIYPVISLYNLVRNYVTQKPYSTKKIKLNFGIPTLADGWSKSKEYSNNAIILMRDNLYYLGIFNAKNKPDKKIIEGNTSENKGDYKKMIYNLLPGPNKMIPKVFLSSKTGVETYKPSAYILEGYKQNKHLKSSKDFDITFCRDLIDYFKNCIAIHPEWKNFGFDFSDTSTYEDISGFYREVELQGYKIDWTYISEKDIDLLQEKGQLYLFQIYNKDFSKKSTGNDNLHTMYLKNLFSEENLKDIVLKLNGEAEIFFRKSSIKNPIIHKKGSILVNRTYEAEEKDQFGNIQIVRKTIPENIYQELYKYFNDKSDKELSDEAAKLKNVVGHHEAATNIVKDYRYTYDKYFLHMPITINFKANKTSFINDRILQYIAKENDLHVIGIDRGERNLIYVSVIDTCGNIVEQKSFNIVNGYDYQIKLKQQEGARQIARKEWKEIGKIKEIKEGYLSLVIHEISKMVIKYNAIIAMEDLSYGFKKGRFKVERQVYQKFETMLINKLNYLVFKDISITENGGLLKGYQLTYIPEKLKNVGHQCGCIFYVPAAYTSKIDPTTGFANIFKFKDLTVDAKREFIKKFDSIRYDSEKNLFCFTFDYNNFITQNTVMSKSSWSVYTYGVRIKRRFVNGRFSNESDTIDITKDMEKTLEMTDINWRDGHDLRQDIIDYEIVQHIFEIFKLTVQMRNSLSELEDRDYDRLISPVLNENNIFYDSAKAGDALPKDADANGAYCIALKGLYEIKQITENWKEDGKFSRDKLKISNKDWFDFIQNKRYL

SEQ ID NO: 173 - protein, 1263 aa, Eubacterium rectale
MNNGTNNFQNFIGISSLQKTLRNALTPTETTQQFIVKNGIIKEDELRGENRQILKDIMDDYYRGFISETLSSIDDIDWTSLFEKMEIQLKNGDNKDTLIKEQAEKRKAIYKKFADDDRFKNMFSAKLISDILPEFVIHNNNYSASEKEEKTQVIKLFSRFATSFKDYFKNRANCFSADDISSSSCHRIVNDNAEIFFSNALVYRRIVKNLSNDDINKISGDMKDSLKKMSLEKIYSYEKYGEFITQEGISFYNDICGKVNSFMNLYCQKNKENKNLYKLRKLHKQILCIADTSYEVPYKFESDEEVYQSVNGFLDNISSKHIVERLRKIGDNYNGYNLDKIYIVSKFYESVSQKTYRDWETINTALEIHYNNILPGNGKSKADKVKKAVKNDLQKSITEINELVSNYKLCPDDNIKAETYIHEISHILNNFEAQELKYNPEIHLVESELKASELKNVLDVIMNAFHWCSVFMTEELVDKDNNFYAELEEIYDEIYPVISLYNLVRNYVTQKPYSTKKIKLNFGIPTLADGWSKSKEYSNNAIILMRDNLYYLGIFNAKNKPEKKIIEGNTSENKGDYKKMIYNLLPGPNKMIPKVFLSSKTGVETYKPSAYILEGYKQNKHLKSSKDFDITFCRDLIDYFKNCIAIHPEWKNFGFDFSDTSTYEDISGFYREVELQGYKIDWTYISEKDIDLLQEKGQLYLFQIYNKDFSKKSTGNDNLHTMYLKNLFSEENLKDVVLKLNGEAEIFFRKSSIKNPIIHKKGSILVNRTYEAEEKDQFGNIQIVRKTIPENIYQELYKYFNDKSDKELSDEAAKLKNAVGHHEAATNIVKDYRYTYDKYFLHMPITINFKANKTSFINDRILQYIAKEKDLHVIGIDRGERNLIYVSVIDTCGNIVEQKSFNIVNGYDYQIKLKQQEGARQIARKEWKEIGKIKEIKEGYLSLVIHEISKMVIKYNAIIAMEDLSYGFKKGRFKVERQVYQKFETMLINKLNYLVFKDISITENGGLLKGYQLTYIPEKLKNVGHQCGCIFYVPAAYTSKIDPTTGFVNIFKFKDLTVDAKREFIKKFDSIRYDSDKNLFCFTFDYNNFITQNTVMSKSSWSVYTYGVRIKRRFVNGRFSNESDTIDITKDMEKTLEMTDINWRDGHDLRQDIIDYEIVQHIFEIFKLTVQMRNSLSELEDRNYDRLISPVLNENNIFYDSAKAGDALPKDADANGAYCIALKGLYEIKQITENWKEDGKFSRDKLKISNKDWFDFIQNKRYL

SEQ ID NO: 174 - protein, 1263 aa, Eubacterium sp.
MNNGTNNFQNFIGISSLQKTLRNALIPTETTQQFIVKNGIIKEDELRGKNRQILKDIMDDYYRGFISETLSSIDDIDWTSLFEKMEIQLKNGDNKDTLIKEQAEKRKAIYKKFADDDRFKNMFSAKLISDILPEFVIHNNNYSASEKKEKTQVIKLFSRFATSFKDYFKNRANCFSADDISSSSCHRIVNDNAEIFFSNALVYRRIVKNLSNDDINKISGDMKDSLKEMSLEEIYSYEKYGEFITQEGISFYNDICGKVNSFMNLYCQKNKENKNLYKLRKLHKQILCIADTSYEVPYKFESDEEVYQSVNGFLDNISSKHIVERLRKIGDNYNDYNLDKIYIVSKFYESVSQKTYRDWETINTALEIHYNNILPGNGKSKADKVKKAVKNDLQKSITEINELVSNYKLCSDDNIKAETYIHEISHILNNFEAHELKYNPEIHLVESELKASELKNVLDIIMNAFHWCSVFMTEELVDKDNNFYAELEEIYDEIYPVISLYNLVRNYVTQKPYSTKKIKLNFGIPTLADGWSKSKEYSNNAIILMRDNLYYLGIFNAKNKPDKKIIEGNTSENKGDYKKMIYNLLPGPNKMIPKVFLSSKTGVETYKPSAYILEGYKQNKHLKSSKDFDITFCHDLIDYFKNCIAIHPEWKNFGFDFSDTSAYEDISGFYREVELQGYKIDWTYISEKDIDLLQEKGQLYLFQIYNKDFSKKSTGNDNLHTMYLKNLFSEENLKDIVLKLNGEAEIFFRKSSIKNPIIHKKGSILVNRTYEAEEKDQFGNIQIVRKTIPENIYQELYKYFNDKSDKELSDEAAKLKNVVGHHEAATNIVKDYRYTYDKYFLHMPITINFKANKTSFINDRILQYIAKEKDLHVIGIDRGERNLIYVSVIDTCGNIVEQKSFNIVNGYDYQIKLKQQEGARQIARKEWKEIGKIKEIKEGYLSLVIHEISKMVIKYNAIIAMEDLSYGFKKGRFKVERQVYQKFETMLINKLNYLVFKDISITENGGLLKGYQLTYIPDKLKNVGHQCGCIFYVPAAYTSKIDPTTGFVNIFKFKDLTVDAKREFIKKFDSIRYDSEKNLFCFTFDYNNFITQNTVMSKSSWSVYTYGVRIKRRFVNGRFSNESDTIDITKDMEKTLEMTDINWRDGHDLRQDIIDYEIVQHIFEIFKLTVQMRNSLSELEDRDYDRLISPVLNENNIFYDSAKAGYALPKDADANGAYCIALKGLYEIKQITENWKEDGKFSRDKLKISNKDWFDFIQNKRYL

SEQ ID NO: 175 - protein, 1145 aa, Alicyclobacillus macrosporangiidus
  source 1..1145: note = Alicyclobacillus macrosporangiidus strain DSM 17980
MVAVKSIKVKLMLGHLPEIREGLWHLHEAVNLGVRYYTEWLALLRQGNLYRRGKDGAQECYMTAEQCRQELLVRLRDRQKRNGHTGDPGTDEELLGVARRLYELLVPQSVGKKGQAQMLASGFLSPLADPKSEGGKGTSKSGRKPAWMGMKEAGDSRWVEAKARYEANKAKDPTKQVIASLEMYGLRPLFDVFTETYKTIRWMPLGKHQGVRAWDRDMFQQSLERLMSWESWNERVGAEFARLVDRRDRFREKHFTGQEHLVALAQRLEQEMKEASPGFESKSSQAHRITKRALRGADGIIDDWLKLSEGEPVDRFDEILRKRQAQNPRRFGSHDLFLKLAEPVFQPLWREDPSFLSRWASYNEVLNKLEDAKQFATFTLPSPCSNPVWARFENAEGTNIFKYDFLFDHFGKGRHGVRFQRMIVMRDGVPTEVEGIVVPIAPSRQLDALAPNDAASPIDVFVGDPAAPGAFRGQFGGAKIQYRRSALVRKGRREEKAYLCGFRLPSQRRTGTPADDAGEVFLNLSLRVESQSEQAGRRNPPYAAVFHISDQTRRVIVRYGEIERYLAEHPDTGIPGSRGLTSGLRVMSVDLGLRTSAAISVFRVAHRDELTPDAHGRQPFFFPIHGMDHLVALHERSHLIRLPGETESKKVRSIREQRLDRLNRLRSQMASLRLLVRTGVLDEQKRDRNWERLQSSMERGGERMPSDWWDLFQAQVRYLAQHRDASGEAWGRMVQAAVRTLWRQLAKQVRDWRKEVRRNADKVKIRGIARDVPGGHSLAQLDYLERQYRFLRSWSAFSVQAGQVVRAERDSRFAVALREHIDNGKKDRLKKLADRILMEALGYVYVTDGRRAGQWQAVYPPCQLVLLEELSEYRFSNDRPPSENSQLMVWSHRGVLEELIHQAQVHDVLVGTIPAAFSSRFDARTGAPGIRCRRVPSIPLKDAPSIPIWLSHYLKQTERDAAALRPGELIPTGDGEFLVTPAGRGASGVRVVHADINAAHNLQRRLWENFDLSDIRVRCDRREGKDGTVVLIPRLTNQRVKERYSGVIFTSEDGVSFTVGDAKTRRRSSASQGEGDDLSDEEQELLAEADDARERSVVLFRDPSGFVNGGRWTAQRAFWGMVHNRIETLLAERFSVSGAAEKVRG

SEQ ID NO: 176 - protein, 1108 aa, Bacillus sp.
  source 1..1108: note = Bacillus hisashii strain C4
MATRSFILKIEPNEEVKKGLWKTHEVLNHGIAYYMNILKLIRQEAIYEHHEQDPKNPKKVSKAEIQAELWDFVLKMQKCNSFTHEVDKDEVFNILRELYEELVPSSVEKKGEANQLSNKFLYPLVDPNSQSGKGTASSGRKPRWYNLKIAGDPSWEEEKKKWEEDKKKDPLAKILGKLAEYGLIPLFIPYTDSNEPIVKEIKWMEKSRNQSVRRLDKDMFIQALERFLSWESWNLKVKEEYEKVEKEYKTLEERIKEDIQALKALEQYEKERQEQLLRDTLNTNEYRLSKRGLRGWREIIQKWLKMDENEPSEKYLEVFKDYQRKHPREAGDYSVYEFLSKKENHFIWRNHPEYPYLYATFCEIDKKKKDAKQQATFTLADPINHPLWVRFEERSGSNLNKYRILTEQLHTEKLKKKLTVQLDRLIYPTESGGWEEKGKVDIVLLPSRQFYNQIFLDIEEKGKHAFTYKDESIKFPLKGTLGGARVQFDRDHLRRYPHKVESGNVGRIYFNMTVNIEPTESPVSKSLKIHRDDFPKVVNFKPKELTEWIKDSKGKKLKSGIESLEIGLRVMSIDLGQRQAAAASIFEVVDQKPDIEGKLFFPIKGTELYAVHRASFNIKLPGETLVKSREVLRKAREDNLKLMNQKLNFLRNVLHFQQFEDITEREKRVTKWISRQENSDVPLVYQDELIQIRELMYKPYKDWVAFLKQLHKRLEVEIGKEVKHWRKSLSDGRKGLYGISLKNIDEIDRTRKFLLRWSLRPTEPGEVRRLEPGQRFAIDQLNHLNALKEDRLKKMANTIIMHALGYCYDVRKKKWQAKNPACQIILFEDLSNYNPYEERSRFENSKLMKWSRREIPRQVALQGEIYGLQVGEVGAQFSSRFHAKTGSPGIRCSVVTKEKLQDNRFFKNLQREGRLTLDKIAVLKEGDLYPDKGGEKFISLSKDRKCVTTHADINAAQNLQKRFWTRTHGFYKVYCKAYQVDGQTVYIPESKDQKQKIIEEFGEGYFILKDGVYEWVNAGKLKIKKGSSKQSSSELVDSDILKDSFDLASELKGEKLMLYRDPSGNVFPSDKWMAAGVFFGKLERILISKLTNQYSISTIEDDSSKQSM

SEQ ID NO: 177 - protein, 1364 aa, unidentified
  source 1..1364: note = Candidatus Lindowbacteria bacterium RIFCSPLOWO2
MPRDDLDLLTNLNSTAKGIRERGKTKEGTDKKKSGRKSSWPMDKAAWETAKTSDSSAHFLEKLKQHPDLKDAFGNLSSGGSKKLEYYKKLAGSAPWKESQSVILEKAARWKEAKQEREEKEQDSSEHGSKAAYRRLFDAGCLPMPEFAKYIDENQIEFGDLKLSDCGAEWKRGMWNQAGQRVRSHMGWQRRREKENAVYSLRKELFEKGGAIRRKKSEELTPEDILPGKAAPDQNDWQERPAYGNQMWFIGLRSYEENEMAKYAEEAGMGSRSAPRIRRGTIKGWSKLRERWLQILKRNPQATRDDLIGELNALRSQDPRAYGDARLFDWLSKTDQRFLWDGFDADGKILCGRDDRDCVSAFVAYNEEFADEPSSITLTETDERLHPVWPFFGESSAVPYEIEYDLETACPTAIRLPLLVGKENGGYAERQGTRLPLAEYADLASSFQLPTPVRLDVLVEIREVTRAGRKVTCPFSYFKQNGVWYVREGEIPSGESIQIKQTDRKIENGKIFISSKLRMAYRDDLMVSPATGDFGSIKILWERIELASHVDQKKLPETAPARSRVFVSFSCNVVERAPRKQLTRKPDAVVVTIPSGVDQGLVVVSTDVRTGKSKSSSAPPLPPGSRLWPADAVHGDPPLRILSVDLGHRHSAYAVWELGLQQKSWRAGVLKGSTQTPVYADCTGTGLLCLPGDGEDTPAEEESLRLRSRQIRRRLNLQNSILRVSRLLSLDKFEKTIFEQSDVRDRPNKKGLRIRRRCRTEKTPLSEAEVRKNCDKAAEILIRWADTDAMAKSLAATGNADISFWKYMAVKNPPLSAVVDVAPSTIVPDDGPDRETLKKKRQEEEEKFASSIYENRVKLAGALCSGYDADHRRPATGGLWHDLDRTLIREISYGDRGQKGNPRKLNNEGILRLLRRPPRARPDWREFHRTLNDANRIPKGRTLRGGLSMGRLNFLKEVGDFVKKWSCRPRWPGDRRHIPPGQLFDRQDAEHLEHLRDDRIKRLAHLIVAQALGFEPDIRRGLWKYVDGSTGEILWQHPETRRFFAEGAAGELREVSRPAEIDDDAAARPHTVSAPAHIVVFENLIRYRFQSDRPKTENAGLMQWAHRQIVHFTKQVASLYGLKVAMVYAAFSSKFCSRCGSPGARVSRFDPAWRNQEWFKRRTSNPRSKVDHSLKRASEDPTADETRPWVLIEGGKEFVCANAKCSAHDEPLNADENAAANIGLRFLRGVEDFRTKVNPAGALKGKLRFETGIHSFRPPVSGSPFWSPMAEPAQKKKIGAAAPGADVDEAGDADESGVVVLFRDPSGAFRNKQYWYEGKIFWSNVMMAVEAKIAGASVGAKPVAASWGQAQPQSGPGLAKPGGD

SEQ ID NO: 178 - protein, 1364 aa, unidentified
  source 1..1364: note = Elusimicrobia bacterium RIFOXYA12
MNRIYQGRVTKVEVPDGKDEKGNIKWKKLENWSDILWQHHMLFQDAVNYYTLALAAISGSAVGSDEKSIILREWAVQVQNIWEKAKKKATVFEGPQKRLTSILGLEQNASFDIAAKHILRTSEAKPEQRASALIRLLEEIDKKNHNVVCGERLPFFCPRNIQSKRSPTSKAVSSVQEQKRQEEVRRFHNMQPEEVVKNAVTLDISLFKSSPKIVFLEDPKKARAELLKQFDNACKKHKELVGIKKAFTESIDKHGSSLKVPAPGSKPSGLYPSAIVFKYFPVDITKTVFLKATEKLAMGKDREVTNDPIADARVNDKPHFDYFTNIALIREKEKNRAAWFEFDLAAFIEAIMSPHRFYQDTQKRKEAARKLEEKIKAIEGKGGQFKESDSEDDDVDSLPGFEGDTRIDLLRKLVTDTLGWLGESETPDNNEGKKTEYSISERTLRIFPDIQKQWSELAEKGETTEGKLLEVLKHEQTEHQSDFGSATLYQHLAKPEFHPIWLKSGTEEWHAENPLKAWLNYKELQYELTDKKRPIHFTPAHPVYSPRYFDFPKKSETEEKEVSKNTHSLTTSLASEHIKNSLQFTAGLIRKTNVGKKAIKARFSYSAPRLRRDCLRSENNENLYKAPWLQPMMRALGIDEEKADRQNFANTRITLMAKGLDDIQLGFPVEANSQELQKEVSNGISWKGQFNWGGIASLSALRWPHEKKPKNPPEQPWWGIDSFSCLAVDLGQRYAGAFARLDVSTIEKKGKSRFIGEACDKKWYAKVSRMGLLRLPGEDVKVWRDASKIDKENGFAFRKELFGEKGRSATPLEAEETAELIKLFGANEKDVMPDNWSKELSFPEQNDKLLIVARRAQAAVSRLHRWAWFFDEAKRSDDAIREILESDDTDLKQKVNKNEIEKVKETIISLLKVKQELLPTLLTRLANRVLPLRGRSWEWKKHHQKNDGFILDQTGKAMPNVLIRGQRGLSMDRIEQITELRKRFQALNQSLRRQIGKKAPAKRDDSIPDCCPDLLEKLDHMKEQRVNQTAHMILAEALGLKLAEPPKDKKELNETCDMHGAYAKVDNPVSFIVIEDLSRYRSSQGRSPRENSRLMKWCHRAVRDKLKEMCEVFFPLCERRKAGSAWVSLPPLLETPAAYSSRFCSRSGVAGFRAVEVIPGFELKYPWSWLKDKKDKAGNLAKEALNIRTVSEQLKAFNQDKPEKPRTLLVPIAGGPIFVPISEVGLSSFGLKPQVVQADINAAINLGLRAISDPRIWEIHPRLRTEKRDGRLFAREKRKYGEEKVEVQPSKNEKAKKVKDDRKPNYFADFSGKVDWGFGNIKNESGLTLVSGKALWWTINQLQWERCFDINKRHIEDWSNKQKQ

SEQ ID NO: 179 - protein, 1413 aa, unidentified
  source 1..1413: note = Omnitrophica WOR_2 bacterium RIFCSPHIGHO2
MNRIYQGRVTKVEKLKNGKSPDDREELKDWQTALWRHHELFQDAVSYYTLALAAMAEGLPDKHPINVLRKRMEEAWEEFPRKTVTPAKNLRDSVRPWLGLSESASFGDALKKILPPAPENKEVRALAVALLAEKARTLKPQKTSASYWGRFCDDLKKKPNWDYSEEELARKTGSGDWVAGLWSEDALNKIDELAKSLKLSSLVKCVPDGQINPEGARNLVKEALDHLEGVSNGTKKEKNDPGPAKKTNNWLRQHASDVRNFIHKNKNQFSSLPNGRLITERARGGGININKTYAGVLFKAFPCPFTFDYVRAAVPEPKVKKVDQEKKSEQSATWTELEKRILRIGDDPIELARKNNKPIFKAFTALEKWSDQNSKSCWSDFDKCAFEEALKTLNQFNQKTEEREKRRSEAEAELKYMMDENPEWKPKKETEGDDVREVPILKGDPRYEKLVKLFGDLDEEGSEHATGKIYGPSRASLRGFGKLRNEWVDLFTKANDNPREQDLQKAVTGFQREHKLDMGYTAFFLKLCERDYWDIWRDDTEVEVKKIREKRWVKSVVYAAADTRELAEELERLQEPVRYTPAEPQFSRRLFMFSDIKGKQGAKHIREGLVEVSLAVKDQSGKYGTCRVRLHYSAPRLIRDHLSDGSSSMWLQPMMAALGLSSDARGCFTRDSKGNVKEPAVALMSDFVGRKRELRMLLNFPVDLDISKLEENIGKKARWEKQMNTAYEKNKLKQRFHLIWPGMELKETQEPGQFWWDNPTIQKEGMYCLAIDLSQRRAADYALLHAGVNRDSKTFVELGQAGGQSWFTKLCAAGSLRLPGEDTEVIREGKRQIELSGKKGRNATQSEYDQAIALAKQLLHNENSAELESAARDWLGDNAKRFSFPEQNDKLIDLYYGALSRYKTWLRWSWRLTEQHKELWDKTLDEIRKVPYFASWGELAGNGTNEATVQQLQKLIADAAVDLRNFLEKALLHIAYRALPLRENTWRWIENGKDGKGKPLHLLVSDGQSPAEIPWLRGQRGLSIARIEQLENFRRAVLSLNRLLRHEIGTKPEFGSSTCGESLPDPCPDLTDKIVRLKEERVNQTAHLIIAQSLGVRLKGHSLFTEEREKADMHGEHEVIPGRSPVDFVVLEDLSRYTTDKSRSRSENSRLMKWCHRKINEKVKLLAEPFGIPVIEVFASYSSKFDARTGAPGFRAVEVTSEDRPFWRKTIEKQSVAREVFDCLDNLVGKGLNGIHLVLPQNGGPLFIAAVKEDQPLPAIRQADINAAVNIGLRAIAGPSCYHAHPKVRLIKGESGTDKGKWLPRKGKEANKRENAQFGNVDLDLEVKFNRLDIDSDVLKGDNTNLFHDPLNIACYGFATIQNLQHPFLAHASAVFSRQKGAVARLQWEVCRAINSRRLEAWQKKAEKAAVKR

SEQ ID NO: 180 - protein, 747 aa, unidentified
  source 1..747: note = Phycisphaerae bacterium ST-NAGAB-D1
MATKSYRARILTDSRLAAALDRTHVVFVESLKQMINTYLRMQNGKFGPDHKKLAQIMLSRSNTFAHGVMDQITRDQPTSTLDEEWTDLARRIHKTTGPLFLQAERFATVKNRAIHTKSRGKVIPSPETLAVPAKFWHQVCDSASAYIRSNRELMQQWRKDRAAWLKDKNEWQQKHPEFMQFYNGPYQNFLKLCDDDRITSQLAAEQQPTASKNNRPRKTGKRFARWHLWYKWLSENPEIIEWRNKASASDFKTVTDDVRKQIITKYPQQNKYITRLLDWLEDNNPELKTLENLRRTYVKKFDSFKRPPTLTLPSPYRHPYWFTMELDQFYKKADFENGTIQLLLIDEDDDGNWFFNWMPASLKPDPRLVPSWRAETFETEGRFPPYLGGKIGKKLSRPAPTDAERKAGIAGAKLMIKNNRSELLFTVFEQDCPPRVKWAKTKNRKCPADNAFSSDGKTRKPLRILSIDLGIRHIGAFALTQGTRNDSAWQTESLKKGIINSPSIPPLRQVRRHDYDLKRKRRRHGKPVKGQRSNANLQAHRTNMAQDRFKKGASAIVSLAREHSADLILFENLHSLKFSAFDERWMNRQLRDMNRRHIVELVSEQAPEFGITVKDDINPWMTSRICSNCNLPGFRFSMKKKNPYREKLPREKCTDFGYPVWEPGGHLFRCPHCDHRVNADINAAANLANKFFGLGYWNNGLKYDAETKTFTVHTDKKTPPLIFKPRPQFDLWADSVKTRKQLGPDPF

SEQ ID NO: 181 - protein, 743 aa, unidentified
  source 1..743: note = Planctomycetes bacterium RBG_13_46_10
MSVRSFQARVECDKQTMEHLWRTHKVFNERLPEIIKILFKMKRGECGQNDKQKSLYKSISQSILEANAQNADYLLNSVSIKGWKPGTAKKYRNASFTWADDAAKLSSQGIHVYDKKQVLGDLPGMMSQMVCRQSVEAISGHIELTKKWEKEHNEWLKEKEKWESEDEHKKYLDLREKFEQFEQSIGGKITKRRGRWHLYLKWLSDNPDFAAWRGNKAVINPLSEKAQIRINKAKPNKKNSVERDEFFKANPEMKALDNLHGYYERNFVRRRKTKKNPDGFDHKPTFTLPHPTIHPRWFVFNKPKTNPEGYRKLILPKKAGDLGSLEMRLLTGEKNKGNYPDDWISVKFKADPRLSLIRPVKGRRVVRKGKEQGQTKETDSYEFFDKHLKKWRPAKLSGVKLIFPDKTPKAAYLYFTCDIPDEPLTETAKKIQWLETGDVTKKGKKRKKKVLPHGLVSCAVDLSMRRGTTGFATLCRYENGKIHILRSRNLWVGYKEGKGCHPYRWTEGPDLGHIAKHKREIRILRSKRGKPVKGEESHIDLQKHIDYMGEDRFKKAARTIVNFALNTENAASKNGFYPRADVLLLENLEGLIPDAEKERGINRALAGWNRRHLVERVIEMAKDAGFKRRVFEIPPYGTSQVCSKCGALGRRYSIIRENNRREIRFGYVEKLFACPNCGYCANADHNASVNLNRRFLIEDSFKSYYDWKRLSEKKQKEEIETIESKLMDKLCAMHKISRGSISK

SEQ ID NO: 182 - protein, 1119 aa, unidentified
  source 1..1119: note = Spirochaetes bacterium GWB1_27_13
MSFTISYPFKLIIKNKDEAKALLDTHQYMNEGVKYYLEKLLMFRQEKIFIGEDETGKRIYIEETEYKKQIEEFYLIKKTELGRNLTLTLDEFKTLMRELYICLVSSSMENKKGFPNAQQASLNIFSPLFDAESKGYILKEENNNISLIHKDYGKILLKRLRDNNLIPIFTKFTDIKKITAKLSPTALDRMIFAQAIEKLLSYESWCKLMIKERFDKEVKIKELENKCENKQERDKIFEILEKYEEERQKTFEQDSGFAKKGKFYITGRMLKGFDEIKEKWLKEKDRSEQNLINILNKYQTDNSKLVGDRNLFEFIIKLENQCLWNGDIDYLKIKRDINKNQIWLDRPEMPRFTMPDFKKHPLWYRYEDPSNSNFRNYKIEVVKDENYITIPLITERNNEYFEENYTFNLAKLKKLSENITFIPKSKNKEFEFIDSNDEEEDKKDQKKSKQYIKYCDTAKNTSYGKSGGIRLYFNRNELENYKDGKKMDSYTVFTLSIRDYKSLFAKEKLQPQIFNTVDNKITSLKIQKKFGNEEQTNFLSYFTQNQITKKDWMDEKTFQNVKELNEGIRVLSVDLGQRFFAAVSCFEIMSEIDNNKLFFNLNDQNHKIIRINDKNYYAKHIYSKTIKLSGEDDDLYKERKINKNYKLSYQERKNKIGIFTRQINKLNQLLKIIRNDEIDKEKFKELIETTKRYVKNTYNDGIIDWNNVDNKILSYENKEDVINLHKELDKKLEIDFKEFIRECRKPIFRSGGLSMQRIDFLEKLNKLKRKWVARTQKSAESIVLTPKFGYKLKEHINELKDNRVKQGVNYILMTALGYIKDNEIKNDSKKKQKEDWVKKNRACQIILMEKLTEYTFAEDRPREENSKLRMWSHRQIFNFLQQKASLWGILVGDVFAPYTSKCLSDNNAPGIRCHQVTKKDLIDNSWFLKIVVKDDAFCDLIEINKENVKNKSIKINDILPLRGGELFASIKDGKLHIVQADINASRNIAKRFLSQINPFRVVLKKDKDETFHLKNEPNYLKNYYSILNFVPTNEELTFFKVEENKDIKPTKRIKMDKHEKESTDEGDDYSKNQIALFRDDSGIFFDKSLWVDGKIFWSVVKNKMTKLLRERNNKKNGSK

SEQ ID NO: 183 - protein, 1447 aa, unidentified
  source 1..1447: note = Verrucomicrobiaceae bacterium UBA2429
MPLSRIYQGRTNSLIILTPTPQEPWDHKALARFDSPLWRHHALFQDAVNYYQLCLVALASSDGTRPLSKLHEQMKASWDEAKTDTEDSWRVRLARRLGIPAASLFEAALAKVLEGNEAPERARELAGELLLDKIEGDIQQAGRGYWPRFCDPKANPTYDYSATARASASGLTKLAAVIHAENVTEEALKQVAAEMDLSWTVKLQPDKNFVGAEARARLLEAAHHFIKVAESPPTKLAEVLARFPDGLALWQALPEKIAALPEETQVPRNRKASPDLTFATLLFQHFPSLFTAAVLGLSVGKPKSVKAPKVVEKVSARRKANAVTQAVVIEEPEIDFAELGDDPIKLARGERGFVFPAFTSLSFWAVPGPHVPVWKEFDIAAFKEALKTVNQFKLKTSERNALLAEAQRRLDYMDEKTHDWKTGDSDEPGHIPPRLKSDPNFTLIQALTQDEGVSNKATGDQHIPKGVYTGGLRGFYAIKKDWCELWERKADKSQGTPTEEELISIVTDYQRDHVYDVGDVGLFRALCEPRFWPLWQPLTDEQEAERIKAGRAKDMISAYRVWLELQEDVVRLAQPIRFTPAHAENSRRLFMFSDISGSHGAEFGSDGKSLEVSIAYDVDGKLQPVRAKLEFSAPRAARDELEGLSGGSESMRWFQPMMKALDCPEVEMPALEKCAVSLMPDVVKKGGGKWVRLLLNFPATLEPEGLIRHIGKQAMWYKQFNGTYKPRTQQLDTGLHLYWPGLEKAPEAEDAAAWWNREEIRAKGFSVLSVDLGQRDAGAWALLESRSDKAFSRNRQPFIELGEAGGKLWSTALLGLGMLRLPGEDARTGALDDQGKRAVEFHGKAGRNALEAEWQEAREMALLFGGEEAKSRLGPGFDHLSHSKQNEELLRILSRAQSRLARFHRWSCRIHEKPEATGDDVIDYGQVDELLTKTAEAMLENLKALYTNAGGILDSKSKQPLTLVGLRKKLEAQKVEPEKIAAVLKPHAEIIFQRLGTLIPELKQHLRVSLERLANRELPLRHREWVWNEAFEKLEQGNFKKEENPKWIRGQRGLSMARIEQIENLRKRFMSLRRQMSLIPGEQVKQGVEDKGQRQPEPCEDILNKLDRMKQQRVNQTAHLILAQALGLRLRPHLANDAEREEKDIHGEYELIPGRKPVDFIVMEDLSRYLSSQGRAPSENGRLMKWCHRAVLAKLKQMCEPFGIPVLEVPAAYSSRFCALTGVPGFRAVEVHDGNAEDFRWKRLIKKAEKDKSSKDAEAAAMLFDQLHDLNIEAREARKQDKKLPLRTLFAPVAGGPLFIPMVGGGPRQADMNAAINLGLRAIASPTCLRARPKIRAELKDGKHQAMLGNKLEKAAALTLEPPKEPTKELAAQKRTNFFLDEKFVGKFDTAHVTTSGKKLRLSGGMSLWKAIKDGAWQRVKKINDARIAKWKNNPPPEPDPDDEIQF

SEQ ID NO: 184 - protein, 1147 aa, Alicyclobacillus kakegawensis
MAVKSIKVKLRLSECPDILAGMWQLHRATNAGVRYYTEWVSLMRQEILYSRGPDGGQQCYMTAEDCQRELLRRLRNRQLHNGRQDQPGTDADLLAISRRLYEILVLQSIGKRGDAQQIASSFLSPLVDPNSKGGRGEAKSGRKPAWQKMRDQGDPRWVAAREKYEQRKAVDPSKEILNSLDALGLRPLFAVFTETYRSGVDWKPLGKSQGVRTWDRDMFQQALERLMSWESWNRRVGEEYARLFQQKMKFEQEHFAEQSHLVKLARALEADMRAASQGFEAKRGTAHQITRRALRGADRVFEIWKSIPEEALFSQYDEVIRQVQAEKRRDFGSHDLFAKLAEPKYQPLWRADETFLTRYALYNGVLRDLEKARQFATFTLPDACVNPIWTRFESSQGSNLHKYEFLFDHLGPGRHAVRFQRLLVVESEGAKERDSVVVPVAPSGQLDKLVLREEEKSSVALHLHDTARPDGFMAEWAGAKLQYERSTLARKARRDKQGMRSWRRQPSMLMSAAQMLEDAKQAGDVYLNISVRVKSPSEVRGQRRPPYAALFRIDDKQRRVTVNYNKLSAYLEEHPDKQIPGAPGLLSGLRVMSVDLGLRTSASISVFRVAKKEEVEALGDGRPPHYYPIHGTDDLVAVHERSHLIQMPGETETKQLRKLREERQAVLRPLFAQLALLRLLVRCGAADERIRTRSWQRLTKQGREFTKRLTPSWREALELELTRLEAYCGRVPDDEWSRIVDRTVIALWRRMGKQVRDWRKQVKSGAKVKVKGYQLDVVGGNSLAQIDYLEQQYKFLRRWSFFARASGLVVRADRESHFAVALRQHIENAKRDRLKKLADRILMEALGYVYEASGPREGQWTAQHPPCQLIILEELSAYRFSDDRPPSENSKLMAWGHRGILEELVNQAQVHDVLVGTVYAAFSSRFDARTGAPGVRCRRVPARFVGATVDDSLPLWLTEFLDKHRLDKNLLRPDDVIPTGEGEFLVSPCGEEAARVRQVHADINAAQNLQRRLWQNFDITELRLRCDVKMGGEGTVLVPRVNNARAKQLFGKKVLVSQDGVTFFERSQTGGKPHSEKQTDLTDKELELIAEADEARAKSVVLFRDPSGHIGKGHWIRQREFWSLVKQRIESHTAERIRVRGVGSSLD

SEQ ID NO: 185 - protein, 1112 aa, Bacillus sp.
  source 1..1112: note = Bacillus sp._V3-13
MAIRSIKLKMKTNSGTDSIYLRKALWRTHQLINEGIAYYMNLLTLYRQEAIGDKTKEAYQAELINIIRNQQRNNGSSEEHGSDQEILALLRQLYELIIPSSIGESGDANQLGNKFLYPLVDPNSQSGKGTSNAGRKPRWKRLKEEGNPDWELEKKKDEERKAKDPTVKIFDNLNKYGLLPLFPLFTNIQKDIEWLPLGKRQSVRKWDKDMFIQAIERLLSWESWNRRVADEYKQLKEKTESYYKEHLTGGEEWIEKIRKFEKERNMELEKNAFAPNDGYFITSRQIRGWDRVYEKWSKLPESASPEELWKVVAEQQNKMSEGFGDPKVFSFLANRENRDIWRGHSERIYHIAAYNGLQKKLSRTKEQATFTLPDAIEHPLWIRYESPGGTNLNLFKLEEKQKKNYYVTLSKIIWPSEEKWIEKENIEIPLAPSIQFNRQIKLKQHVKGKQEISFSDYSSRISLDGVLGGSRIQFNRKYIKNHKELLGEGDIGPVFFNLVVDVAPLQETRNGRLQSPIGKALKVISSDFSKVIDYKPKELMDWMNTGSASNSFGVASLLEGMRVMSIDMGQRTSASVSIFEVVKELPKDQEQKLFYSINDTELFAIHKRSFLLNLPGEVVTKNNKQQRQERRKKRQFVRSQIRMLANVLRLETKKTPDERKKAIHKLMEIVQSYDSWTASQKEVWEKELNLLTNMAAFNDEIWKESLVELHHRIEPYVGQIVSKWRKGLSEGRKNLAGISMWNIDELEDTRRLLISWSKRSRTPGEANRIETDEPFGSSLLQHIQNVKDDRLKQMANLIIMTALGFKYDKEEKDRYKRWKETYPACQIILFENLNRYLFNLDRSRRENSRLMKWAHRSIPRTVSMQGEMFGLQVGDVRSEYSSRFHAKTGAPGIRCHALTEEDLKAGSNTLKRLIEDGFINESELAYLKKGDIIPSQGGELFVTLSKRYKKDSDNNELTVIHADINAAQNLQKRFWQQNSEVYRVPCQLARMGEDKLYIPKSQTETIKKYFGKGSFVKNNTEQEVYKWEKSEKMKIKTDTTFDLQDLDGFEDISKTIELAQEQQKKYLTMFRDPSGYFFNNETWRPQKEYWSIVNNIIKSCLKKKILSNKVEL

SEQ ID NO: 186 - protein, 1489 aa, Desulfatirhabdium butyrativorans
MPLSNNPPVTQRAYTLRLRGADPSDLSWREALWHTHEAVNKGAKVFGDWLLTLRGGLDHTLADTKVKGGKGKPDRDPTPEERKARRILLALSWLSVESKLGAPSSYIVASGDEPAKDRNDNVVSALEEILQSRKVAKSEIDDWKRDCSASLSAAIRDDAVWVNRSKVFDEAVKSVGSSLTREEAWDMLERFFGSRDAYLTPMKDPEDKSSETEQEDKAKDLVQKAGQWLSSRYGTSEGADFCRMSDIYGKIAAWADNASQGGSSTVDDLVSELRQHFDTKESKATNGLDWIIGLSSYTGHTPNPVHELLRQNTSLNKSHLDDLKKKANTRAESCKSKIGSKGQRPYSDAILNDVESVCGFTYRVDKDGQPVSVADYSKYDVDYKWGTARHYIFAVMLDHAARRISLAHKWIKRAEAERHKFEEDAKRIANVPARAREWLDSFCKERSVTSGAVEPYRIRRRAVDGWKEVVAAWSKSDCKSTEDRIAAARALQDDSEIDKFGDIQLFEALAEDDALCVWHKDGEATNEPDFQPLIDYSLAIEAEFKKRQFKVPAYRHPDELLHPVFCDFGKSRWKINYDVHKNVQAPFYRGLCLTLWTGSEIKPVPLCWQSKRLTRDLALGNNHRNDAASAVTRADRLGRAASNVTKSDMVNITGLFEQADWNGRLQAPRQQLEAIAVVRDNPRLSEQERNLRMCGMIEHIRWLVTFSVKLQPQGPWCAYAEQHGLNTNPQYWPHADTNRDRKVHARLILPRLPGLRVLSVDLGHRYAAACAVWEAVNTETVKEACQNVGRDMPKEHDLYLHIKVKKQGIGKQTEVDKTTIYRRIGADTLPDGRPHPAPWARLDRQFLIKLQGEEKDAREASNEEIWALHQMECKLDRTKPLIDRLIASGWGLLKRQMARLDALKELGWIPAPDSSENLSREDGEAKDYRESLAVDDLMFSAVRTLRLALQRHGNRARIAYYLISEVKIRPGGIQEKLDENGRIDLLQDALALWHELFSSPGWRDEAAKQLWDSRIATLAGYKAPEENGDNVSDVAYRKKQQVYREQLRNVAKTLSGDVITCKELSDAWKERWEDEDQRWKKLLRWFKDWVLPSGTQANNATIRNVGGLSLSRLATITEFRRKVQVGFFTRLRPDGTRHEIGEQFGQKTLDALELLREQRVKQLASRIAEAALGIGSEGGKGWDGGKRPRQRINDSRFAPCHAVVIENLANYRPDETRTRLENRRLMTWSASKVHKYLSEACQLNGLYLCTVSAWYTSRQDSRTGAPGIRCQDVSVREFMQSPFWRKQVKQAEAKHDENKGDARERFLCELNKTWKAKTPAEWKKAGFVRIPLRGGEIFVSADSKSPSAKGIHADLNAAANIGLRALTDPDWPGKWWYVPCDPVSFESKMDYVKGCAAVKVGQPLRQPAQTNADGAASKIRKGKKNRTAGTSKEKVYLWRDISAFPLESNEIGEWKETSAYQNDVQYRVIRMLKEHIKSLDNRTGDNVEG

SEQ ID NO: 187 - protein, 1194 aa, Desulfonatronum thiodismutans
MVLGRKDDTAELRRALWTTHEHVNLAVAEVERVLLRCRGRSYWTLDRRGDPVHVPESQVAEDALAMAREAQRRNGWPVVGEDEEILLALRYLYEQIVPSCLLDDLGKPLKGDAQKIGTNYAGPLFDSDTCRRDEGKDVACCGPFHEVAGKYLGALPEWATPISKQEFDGKDASHLRFKATGGDDAFFRVSIEKANAWYEDPANQDALKNKAYNKDDWKKEKDKGISSWAVKYIQKQLQLGQDPRTEVRRKLWLELGLLPLFIPVFDKTMVGNLWNRLAVRLALAHLLSWESWNHRAVQDQALARAKRDELAALFLGMEDGFAGLREYELRRNESIKQHAFEPVDRPYVVSGRALRSWTRVREEWLRHGDTQESRKNICNRLQDRLRGKFGDPDVFHWLAEDGQEALWKERDCVTSFSLLNDADGLLEKRKGYALMTFADARLHPRWAMYEAPGGSNLRTYQIRKTENGLWADVVLLSPRNESAAVEEKTFNVRLAPSGQLSNVSFDQIQKGSKMVGRCRYQSANQQFEGLLGGAEILFDRKRIANEQHGATDLASKPGHVWFKLTLDVRPQAPQGWLDGKGRPALPPEAKHFKTALSNKSKFADQVRPGLRVLSVDLGVRSFAACSVFELVRGGPDQGTYFPAADGRTVDDPEKLWAKHERSFKITLPGENPSRKEEIARRAAMEELRSLNGDIRRLKAILRLSVLQEDDPRTEHLRLFMEAIVDDPAKSALNAELFKGFGDDRFRSTPDLWKQHCHFFHDKAEKVVAERFSRWRTETRPKSSSWQDWRERRGYAGGKSYWAVTYLEAVRGLILRWNMRGRTYGEVNRQDKKQFGTVASALLHHINQLKEDRIKTGADMIIQAARGFVPRKNGAGWVQVHEPCRLILFEDLARYRFRTDRSRRENSRLMRWSHREIVNEVGMQGELYGLHVDTTEAGFSSRYLASSGAPGVRCRHLVEEDFHDGLPGMHLVGELDWLLPKDKDRTANEARRLLGGMVRPGMLVPWDGGELFATLNAASQLHVIHADINAAQNLQRRFWGRCGEAIRIVCNQLSVDGSTRYEMAKAPKARLLGALQQLKNGDAPFHLTSIPNSQKPENSYVMTPTNAGKKYRAGPGEKSSGEEDELALDIVEQAEELAQGRKTFFRDPSGVFFAPDRWLPSEIYWSRIRRRIWQVTLERNSSGRQERAEMDEMPY

SEQ ID NO: 188 - protein, 1326 aa, unidentified
  source 1..1326: note = Lentisphaeria bacterium
MAVELNRIYQGRVNHVYIFDENQNQVSVDNGDDLLFVHHELYQDAINYYLVALAAMALDSKDSLFGKFKMQIRAVWNDFYRNGQLRPGLKHSLIRSLGHAAELNTSNGADIAMNLILEDGGIPSEILNAALEHLAEKCTGDVSQLGKTFFPRFCDTAYHGNWDVDAKSFSEKKGRQRLVDALYSLHPVQAVQELAPEIEIGWGGVKTQTGKFFTGDEAKASLKKAISYFLQDTGKNSPELQEYFSVAGKQPLEQYLGKIDTFPEISFGRISSHQNINISNAMWILKFFPDQYSVDLIKNLIPNKKYEIGIAPQWGDDPVKLSRGKRGYTFRAFTDLAMWEKNWKVFDRAAFSDALKTINQFRNKTQERNDQLKRYCAALNWMDGESSDKKPPVEPADADAVDEAATSVLPILAGDKRWNALLQLQKELGICNDFTENELMDYGLSLRTIRGYQKLRSMMLEKEEKMRAKTADDEEISQALQEIIIKFQSSHRDTIGSVSLFLKLAEPKYFCVWHDADKNQNFASVDMVADAVRYYSYQEEKARLEEPIQITPADARYSRRVSDLYALVYKNAKECKTGYGLRPDGNFVFEIAQKNAKGYAPAKVVLAFSAPRLKRDGLIDKEFSAYYPPVLQAFLREEEAPKQSFKTTAVILMPDWDKNGKRRILLNFPIKLDVSAIHQKTDHRFENQFYFANNTNTCLLWPSYQYKKPVTWYQGKKPFDVVAVDLGQRSAGAVSRITVSTEKREHSVAIGEAGGTQWYAYRKFSGLLRLPGEDATVIRDGQRTEELSGNAGRLSTEEETVQACVLCKMLIGDATLLGGSDEKTIRSFPKQNDKLLIAFRRATGRMKQLQRWLWMLNENGLCDKAKTEISNSDWLVNKNIDNVLKEEKQHREMLPAILLQIADRVLPLRGRKWDWVLNPQSNSFVLQQTAHGSGDPHKKICGQRGLSFARIEQLESLRMRCQALNRILMRKTGEKPATLAEMRNNPIPDCCPDILMRLDAMKEQRINQTANLILAQALGLRHCLHSESATKRKENGMHGEYEKIPGVEPAAFVVLEDLSRYRFSQDRSSYENSRLMKWSHRKILEKLALLCEVFNVPILQVGAAYSSKFSANAIPGFRAEECSIDQLSFYPWRELKDSREKALVEQIRKIGHRLLTFDAKATIIMPRNGGPVFIPFVPSDSKDTLIQADINASFNIGLRGVADATNLLCNNRVSCDRKKDCWQVKRSSNFSKMVYPEKLSLSFDPIKKQEGAGGNFFVLGCSERILTGTSEKSPVFTSSEMAKKYPNLMFGSALWRNEILKLERCCKINQSRLDKFIAKKEVQNEL

SEQ ID NO: 189 - protein, 1090 aa, Laceyella sediminis
MSIRSFKLKIKTKSGVNAEELRRGLWRTHQLINDGIAYYMNWLVLLRQEDLFIRNEETNEIEKRSKEEIQGELLERVHKQQQRNQWSGEVDDQTLLQTLRHLYEEIVPSVIGKSGNASLKARFFLGPLVDPNNKTTKDVSKSGPTPKWKKMKDAGDPNWVQEYEKYMAERQTLVRLEEMGLIPLFPMYTDEVGDIHWLPQASGYTRTWDRDMFQQAIERLLSWESWNRRVRERRAQFEKKTHDFASRFSESDVQWMNKLREYEAQQEKSLEENAFAPNEPYALTKKALRGWERVYHSWMRLDSAASEEAYWQEVATCQTAMRGEFGDPAIYQFLAQKENHDIWRGYPERVIDFAELNHLQRELRRAKEDATFTLPDSVDHPLWVRYEAPGGTNIHGYDLVQDTKRNLTLILDKFILPDENGSWHEVKKVPFSLAKSKQFHRQVWLQEEQKQKKREVVFYDYSTNLPHLGTLAGAKLQWDRNFLNKRTQQQIEETGEIGKVFFNISVDVRPAVEVKNGRLQNGLGKALTVLTHPDGTKIVTGWKAEQLEKWVGESGRVSSLGLDSLSEGLRVMSIDLGQRTSATVSVFEITKEAPDNPYKFFYQLEGTELFAVHQRSFLLALPGENPPQKIKQMREIRWKERNRIKQQVDQLSAILRLHKKVNEDERIQAIDKLLQKVASWQLNEEIATAWNQALSQLYSKAKENDLQWNQAIKNAHHQLEPVVGKQISLWRKDLSTGRQGIAGLSLWSIEELEATKKLLTRWSKRSREPGVVKRIERFETFAKQIQHHINQVKENRLKQLANLIVMTALGYKYDQEQKKWIEVYPACQVVLFENLRSYRFSYERSRRENKKLMEWSHRSIPKLVQMQGELFGLQVADVYAAYSSRYHGRTGAPGIRCHALTEADLRNETNIIHELIEAGFIKEEHRPYLQQGDLVPWSGGELFATLQKPYDNPRILTLHADINAAQNIQKRFWHPSMWFRVNCESVMEGEIVTYVPKNKTVHKKQGKTFRFVKVEGSDVYEWAKWSKNRNKNTFSSITERKPPSSMILFRDPSGTFFKEQEWVEQKTFWGKVQSMIQAYMKKTIVQRMEE

SEQ ID NO: 190 - protein, 1041 aa, Methylobacterium nodulans
MYEAIVLADDANAQLANAFLGPLTDPNSAGFLEAFNKVDRPAPSWLDQVPASDPIDPAVLAEANAWLDTDAGRAWLVDTGAPPRWRSLAAKQDPIWPREFARKLGELRKEAASGTSAIIKALKRDFGVLPLFQPSLAPRILGSRSSLTPWDRLAFRLAVGHLLSWESWCTRARDEHTARVQRLEQFSSAHLKGDLATKVSTLREYERARKEQIAQLGLPMGERDFLITVRMTRGWDDLREKWRRSGDKGQEALHAIIATEQTRKRGRFGDPDLFRWLARPENHHVWADGHADAVGVLARVNAMERLVERSRDTALMTLPDPVAHPRSAQWEAEGGSNLRNYQLEAVGGELQITLPLLKAADDGRCIDTPLSFSLAPSDQLQGVVLTKQDKQQKITYCTNMNEVFEAKLGSADLLLNWDHLRGRIRDRVDAGDIGSAFLKLALDVAHVLPDGVDDQLARAAFHFQSAKGAKSKHADSVQAGLRVLSIDLGVRSFATCSVFELKDTAPTTGVAFPLAEFRLWAVHERSFTLELPGENVGAAGQQWRAQADAELRQLRGGLNRHRQLLRAATVQKGERDAYLTDLREAWSAKELWPFEASLLSELERCSTVADPLWQDTCKRAARLYRTEFGAVVSEWRSRTRSREDRKYAGKSMWSVQHLTDVRRFLQSWSLAGRASGDIRRLDRERGGVFAKDLLDHIDALKDDRLKTGADLIVQAARGFQRNEFGYWVQKHAPCHVILFEDLSRYRMRTDRPRRENSQLMQWAHRGVPDMVGMQGEIYGIQDRRDPDSARKHARQPLAAFCLDTPAAFSSRYHASTMTPGIRCHPLRKREFEDQGFLELLKRENEGLDLNGYKPGDLVPLPGGEVFVCLNANGLSRIHADINAAQNLQRRFWTQHGDAFRLPCGKSAVQGQIRWAPLSMGKRQAGALGGFGYLEPTGHDSGSCQWRKTTEAEWRRLSGAQKDRDEAAAAEDEELQGLEEELLERSGERVVFFRDPSGVVLPTDLWFPSAAFWSIVRAKTVGRLRSHLDAQAEASYAVAAGL

SEQ ID NO: 191 - protein, 1388 aa, unidentified
  source 1..1388: note = Opitutaceae bacterium
MSLNRIYQGRVAAVETGTALAKGNVEWMPAAGGDEVLWQHHELFQAAINYYLVALLALADKNNPVLGPLISQMDNPQSPYHVWGSFRRQGRQRTGLSQAVAPYITPGNNAPTLDEVFRSILAGNPTDRATLDAALMQLLKACDGAGAIQQEGRSYWPKFCDPDSTANFAGDPAMLRREQHRLLLPQVLHDPAITHDSPALGSFDTYSIATPDTRTPQLTGPKARARLEQAITLWRVRLPESAADFDRLASSLKKIPDDDSRLNLQGYVGSSAKGEVQARLFALLLFRHLERSSFTLGLLRSATPPPKNAETPPPAGVPLPAASAADPVRIARGKRSFVFRAFTSLPCWHGGDNIHPTWKSFDIAAFKYALTVINQIEEKTKERQKECAELETDFDYMHGRLAKIPVKYTTGEAEPPPILANDLRIPLLRELLQNIKVDTALTDGEAVSYGLQRRTIRGFRELRRIWRGHAPAGTVFSSELKEKLAGELRQFQTDNSTTIGSVQLFNELIQNPKYWPIWQAPDVETARQWADAGFADDPLAALVQEAELQEDIDALKAPVKLTPADPEYSRRQYDFNAVSKFGAGSRSANRHEPGQTERGHNTFTTEIAARNAADGNRWRATHVRIHYSAPRLLRDGLRRPDTDGNEALEAVPWLQPMMEALAPLPTLPQDLTGMPVFLMPDVTLSGERRILLNLPVTLEPAALVEQLGNAGRWQNQFFGSREDPFALRWPADGAVKTAKGKTHIPWHQDRDHFTVLGVDLGTRDAGALALLNVTAQKPAKPVHRIIGEADGRTWYASLADARMIRLPGEDARLFVRGKLVQEPYGERGRNASLLEWEDARNIILRLGQNPDELLGADPRRHSYPEINDKLLVALRRAQARLARLQNRSWRLRDLAESDKALDEIHAERAGEKPSPLPPLARDDAIKSTDEALLSQRDIIRRSFVQIANLILPLRGRRWEWRPHVEVPDCHILAQSDPGTDDTKRLVAGQRGISHERIEQIEELRRRCQSLNRALRHKPGERPVLGRPAKGEEIADPCPALLEKINRLRDQRVDQTAHAILAAALGVRLRAPSKDRAERRHRDIHGEYERFRAPADFVVIENLSRYLSSQDRARSENTRLMQWCHRQIVQKLRQLCETYGIPVLAVPAAYSSRFSSRDGSAGFRAVHLTPDHRHRMPWSRILARLKAHEEDGKRLEKTVLDEARAVRGLFDRLDRFNAGHVPGKPWRTLLAPLPGGPVFVPLGDATPMQADLNAAINIALRGIAAPDRHDIHHRLRAENKKRILSLRLGTQREKARWPGGAPAVTLSTPNNGASPEDSDALPERVSNLFVDIAGVANFERVTIEGVSQKFATGRGLWASVKQRAWNRVARLNETVTDNNRNEEEDDIPM

SEQ ID NO: 192 - protein, 1465 aa, Thermomonas hydrothermalis
MSEKTTQRAYTLRLNRASGECAVCQNNSCDCWHDALWATHKAVNRGAKAFGDWLLTLRGGLCHTLVEMEVPAKGNNPPQRPTDQERRDRRVLLALSWLSVEDEHGAPKEFIVATGRDSADDRAKKVEEKLREILEKRDFQEHEIDAWLQDCGPSLKAHIREDAVWVNRRALFDAAVERIKTLTWEEAWDFLEPFFGTQYFAGIGDGKDKDDAEGPARQGEKAKDLVQKAGQWLSARFGIGTGADFMSMAEAYEKIAKWASQAQNGDNGKATIEKLACALRPSEPPTLDTVLKCISGPGHKSATREYLKTLDKKSTVTQEDLNQLRKLADEDARNCRKKVGKKGKKPWADEVLKDVENSCELTYLQDNSPARHREFSVMLDHAARRVSMAHSWIKKAEQRRRQFESDAQKLKNLQERAPSAVEWLDRFCESRSMTTGANTGSGYRIRKRAIEGWSYVVQAWAEASCDTEDKRIAAARKVQADPEIEKFGDIQLFEALAADEAICVWRDQEGTQNPSILIDYVTGKTAEHNQKRFKVPAYRHPDELRHPVFCDFGNSRWSIQFAIHKEIRDRDKGAKQDTRQLQNRHGLKMRLWNGRSMTDVNLHWSSKRLTADLALDQNPNPNPTEVTRADRLGRAASSAFDHVKIKNVFNEKEWNGRLQAPRAELDRIAKLEEQGKTEQAEKLRKRLRWYVSFSPCLSPSGPFIVYAGQHNIQPKRSGQYAPHAQANKGRARLAQLILSRLPDLRILSVDLGHRFAAACAVWETLSSDAFRREIQGLNVLAGGSGEGDLFLHVEMTGDDGKRRTVVYRRIGPDQLLDNTPHPAPWARLDRQFLIKLQGEDEGVREASNEELWTVHKLEVEVGRTVPLIDRMVRSGFGKTEKQKERLKKLRELGWISAMPNEPSAETDEKEGEIRSISRSVDELMSSALGTLRLALKRHGNRARIAFAMTADYKPMPGGQKYYFHEAKEASKNDDETKRRDNQIEFLQDALSLWHDLFSSPDWEDNEAKKLWQNHIATLPNYQTPEEISAELKRVERNKKRKENRDKLRTAAKALAENDQLRQHLHDTWKERWESDDQQWKERLRSLKDWIFPRGKAEDNPSIRHVGGLSITRINTISGLYQILKAFKMRPEPDDLRKNIPQKGDDELENFNRRLLEARDRLREQRVKQLASRIIEAALGVGRIKIPKNGKLPKRPRTTVDTPCHAVVIESLKTYRPDDLRTRRENRQLMQWSSAKVRKYLKEGCELYGLHFLEVPANYTSRQCSRTGLPGIRCDDVPTGDFLKAPWWRRAINTAREKNGGDAKDRFLVDLYDHLNNLQSKGEALPATVRVPRQGGNLFIAGAQLDDTNKERRAIQADLNAAANIGLRALLDPDWRGRWWYVPCKDGTSEPALDRIEGSTAFNDVRSLPTGDNSSRRAPREIENLWRDPSGDSLESGTWSPTRAYWDTVQSRVIELLRRHAGLPTS

SEQ ID NO: 193 - protein, 370 aa, Methylobacterium nodulans
MYEAIVLADDANAQLANAFLGPLTDPNSAGFLEAFNKVDRPAPSWLDQVPASDPIDPAVLAEANAWLDTDAGRAWLVDTGAPPRWRSLAAKQDPIWPREFARKLGELRKEAASGTSAIIKALKRDFGVLPLFQPSLAPRILGSRSSLTPWDRLAFRLAVGHLLSWESWCTRARDEHTARVQRLEQFSSAHLKGDLATKVSTLREYERARKEQIAQLGLPMGERDFLITVRMTRGWDDLREKWRRSGDKGQEALHAIIATEQTRKRGRFGDPDLFRWLARPENHHVWADGHADAVGVLARVNAMERLVERSRDTALMTLPDPVAHPRSAQWEAEGGSNLRNYQLEAVGGELQITLPLLKAADDGRCIDTPL

SEQ ID NO: 194 - protein, 1501 aa, unidentified
  source 1..1501: note = Chloracidobacterium thermophilum
MPQQAKPPVTQRAYTLRLRGADSNDPSWRDALWQTHEAVNRGAQAFGDWLLTLRGGLDHTLADTPVKGGKGKPDPDPTDEERKARRILLALSWLSVESKLGAPAGLIIAFGTEAAEERNRKVVAALEEILKSRGVDQNEINAWKKDCSASLSAAIRDDAVWVNRSKAFDEAVESIGSSGSSGSSLTREEPWDMLERFFGSRDAYLAPAKGSEDESSEAKQEDQAKDLVQKAGQWLSSRFGTGKGADFRRMATVYEAIAKWDGKASLEMAGDKAIADLATALSEFNPASNDLQGVLGLISGPGYKSATRNFLNQLAAQTTVTQQDFVSLKDKANNDAQECKQNTGSKGQRPYSNSILEKVESVCGFTYLQDGGPARHSEFAVILDHAARRVSLAHTWIKLAEAERRKFEEDAKKIDQVPEAAKDWLDRFCLERSGVSGALEPYRIRRRAVDGWKEVVAEWSKSDCKTVEDRIAAARALQDDPEIDKFGDIQLFEALAEDDAVCVWHKDGDAAKAPDPQPLIDYALAAEAEFKKRHFKVPAYRHPDALLHPIFCDFGKSRWDICFDVHKNMQTPFPRALCLTLWTGSEMKRIPLCWQSKRLARDLALGNNTGDAGASEVTRADRLGRAASRAASNVTKSDVVNIAGLFEQADWNGRLQAPRQQLEAIARYVEKHDWDQKAEKMRNAIQWLVTFSARLQPQGPWCAYAKIHGLKEDPQYWPHADTNKNRKGHARLILSRLPGLRVLAVDLGHRYAAACAVWEALSTEAFQREIKGRTILRGRTDGNALYCHTRHKANGKERVTIYRRIGADTLPDGKPHPAPWARLDRQFLIKLQGEEEGVREASNEEIWAVHQLEAALGRPVSLIDRLVASGWGGSDKQKARLEGLKQLGWDPADKPSLSVDELMSSAVRTMRLALKRHGDRARIAHYLITDEKTTPGGIKETLDEKGRIDLLQDALVLWHDLFSSRGWRDDTAKQLWNAHVAKLHGYKAPEEPGEDSSGAERKKKQRENREKLYDVAKALAQDVTLREALHDAWKKRWENDDERWKKQLRWFKDWVFPRGNHASDPTIRKRQLINPSGGNGRRGNHASDPTIRKRQLINPSGGNGRRGNHASDPTIRKVGGLSLPRLATLTEFRRKVQVGFFTRLKPDGTRAETKEQFGQSALDALEHLREQRVKQLASRIAEAALGVGRVRRPVEGKDPKRPDVRVDEPCHAIVIEDLTHYRPEETRTRRENRQLMTWSSSKVKKYLAEACQLHGLHLREVSASYTSRQDSRTGAPGVRCQDVPVKEFMRSPFWRKQVKQAEAKQAANKGDARERLLCDLNARWKDRTAADWEKAGAVRIPLQGGEIFVSADANSPAAKGIQADLNAAANIGLRALTDPDWAGKWWYVPCDPASFRPVRDKVDGSAVVNPDQPLRQSAQAQSGDAAKDKNGNKGAGKSKEVVNLWRDISSSPLECIEFGEWKEYAAYQNEVQCRVIRILKEQIKGRDKQPHEGSKEDDIPL

SEQ ID NO: 195 - protein, 1149 aa, Desulfovibrio inopinatus
MPTRTINLKLVLGKNPENATLRRALFSTHRLVNQATKRIEEFLLLCRGEAYRTVDNEGKEAEIPRHAVQEEALAFAKAAQRHNGCISTYEDQEILDVLRQLYERLVPSVNENNEAGDAQAANAWVSPLMSAESEGGLSVYDKVLDPPPVWMKLKEEKAPGWEAASQIWIQSDEGQSLLNKPGSPPRWIRKLRSGQPWQDDFVSDQKKKQDELTKGNAPLIKQLKEMGLLPLVNPFFRHLLDPEGKGVSPWDRLAVRAAVAHFISWESWNHRTRAEYNSLKLRRDEFEAASDEFKDDFTLLRQYEAKRHSTLKSIALADDSNPYRIGVRSLRAWNRVREEWIDKGATEEQRVTILSKLQTQLRGKFGDPDLFNWLAQDRHVHLWSPRDSVTPLVRINAVDKVLRRRKPYALMTFAHPRFHPRWILYEAPGGSNLRQYALDCTENALHITLPLLVDDAHGTWIEKKIRVPLAPSGQIQDLTLEKLEKKKNRLYYRSGFQQFAGLAGGAEVLFHRPYMEHDERSEESLLERPGAVWFKLTLDVATQAPPNWLDGKGRVRTPPEVHHFKTALSNKSKHTRTLQPGLRVLSVDLGMRTFASCSVFELIEGKPETGRAFPVADERSMDSPNKLWAKHERSFKLTLPGETPSRKEEEERSIARAEIYALKRDIQRLKSLLRLGEEDNDNRRDALLEQFFKGWGEEDVVPGQAFPRSLFQGLGAAPFRSTPELWRQHCQTYYDKAEACLAKHISDWRKRTRPRPTSREMWYKTRSYHGGKSIWMLEYLDAVRKLLLSWSLRGRTYGAINRQDTARFGSLASRLLHHINSLKEDRIKTGADSIVQAARGYIPLPHGKGWEQRYEPCQLILFEDLARYRFRVDRPRRENSQLMQWNHRAIVAETTMQAELYGQIVENTAAGFSSRFHAATGAPGVRCRFLLERDFDNDLPKPYLLRELSWMLGNTKVESEEEKLRLLSEKIRPGSLVPWDGGEQFATLHPKRQTLCVIHADMNAAQNLQRRFFGRCGEAFRLVCQPHGDDVLRLASTPGARLLGALQQLENGQGAFELVRDMGSTSQMNRFVMKSLGKKKIKPLQDNNGDDELEDVLSVLPEEDDTGRITVFRDSSGIFFPCNVWIPAKQFWPAVRAMIWKVMASHSLG

SEQ ID NO: 196 - protein, 1132 aa, Tuberibacillus calidus
MATKSFILKMKTKNNPQLRLSLWKTHELFNFGVAYYMDLLSLFRQKDLYMHNDEDPDHPVVLKKEEIQERLWMKVRETQQKNGFHGEVSKDEVLETLRALYEELVPSAVGKSGEANQISNKYLYPLTDPASQSGKGTANSGRKPRWKKLKEAGDPSWKDAYEKWEKERQEDPKLKILAALQSFGLIPLFRPFTENDHKAVISVKWMPKSKNQSVRKFDKDMFNQAIERFLSWESWNEKVAEDYEKTVSIYESLQKELKGISTKAFEIMERVEKAYEAHLREITFSNSTYRIGNRAIRGWTEIVKKWMKLDPSAPQGNYLDVVKDYQRRHPRESGDFKLFELLSRPENQAAWREYPEFLPLYVKYRHAEQRMKTAKKQATFTLCDPIRHPLWVRYEERSGTNLNKYRLIMNEKEKVVQFDRLICLNADGHYEEQEDVTVPLAPSQQFDDQIKFSSEDTGKGKHNFSYYHKGINYELKGTLGGARIQFDREHLLRRQGVKAGNVGRIFLNVTLNIEPMQPFSRSGNLQTSVGKALKVYVDGYPKVVNFKPKELTEHIKESEKNTLTLGVESLPTGLRVMSVDLGQRQAAAISIFEVVSEKPDDNKLFYPVKDTDLFAVHRTSFNIKLPGEKRTERRMLEQQKRDQAIRDLSRKLKFLKNVLNMQKLEKTDEREKRVNRWIKDREREEENPVYVQEFEMISKVLYSPHSVWVDQLKSIHRKLEEQLGKEISKWRQSISQGRQGVYGISLKNIEDIEKTRRLLFRWSMRPENPGEVKQLQPGERFAIDQQNHLNHLKDDRIKKLANQIVMTALGYRYDGKRKKWIAKHPACQLVLFEDLSRYAFYDERSRLENRNLMRWSRREIPKQVAQIGGLYGLLVGEVGAQYSSRFHAKSGAPGIRCRVVKEHELYITEGGQKVRNQKFLDSLVENNIIEPDDARRLEPGDLIRDQGGDKFATLDERGELVITHADINAAQNLQKRFWTRTHGLYRIRCESREIKDAVVLVPSDKDQKEKMENLFGIGYLQPFKQENDVYKWVKGEKIKGKKTSSQSDDKELVSEILQEASVMADELKGNRKTLFRDPSGYVFPKDRWYTGGRYFGTLEHLLKRKLAERRLFDGGSSRRGLFNGTDSNTNVE

SEQ ID NO: 197 - protein, 1108 aa, Bacillus thermoamylovorans
MATRSFILKIEPNEEVKKGLWKTHEVLNHGIAYYMNILKLIRQEAIYEHHEQDPKNPKKVSKAEIQAELWDFVLKMQKCNSFTHEVDKDVVFNILRELYEELVPSSVEKKGEANQLSNKFLYPLVDPNSQSGKGTASSGRKPRWYNLKIAGDPSWEEEKKKWEEDKKKDPLAKILGKLAEYGLIPLFIPFTDSNEPIVKEIKWMEKSRNQSVRRLDKDMFIQALERFLSWESWNLKVKEEYEKVEKEHKTLEERIKEDIQAFKSLEQYEKERQEQLLRDTLNTNEYRLSKRGLRGWREIIQKWLKMDENEPSEKYLEVFKDYQRKHPREAGDYSVYEFLSKKENHFIWRNHPEYPYLYATFCEIDKKKKDAKQQATFTLADPINHPLWVRFEERSGSNLNKYRILTEQLHTEKLKKKLTVQLDRLIYPTESGGWEEKGKVDIVLLPSRQFYNQIFLDIEEKGKHAFTYKDESIKFPLKGTLGGARVQFDRDHLRRYPHKVESGNVGRIYFNMTVNIEPTESPVSKSLKIHRDDFPKFVNFKPKELTEWIKDSKGKKLKSGIESLEIGLRVMSIDLGQRQAAAASIFEVVDQKPDIEGKLFFPIKGTELYAVHRASFNIKLPGETLVKSREVLRKAREDNLKLMNQKLNFLRNVLHFQQFEDITEREKRVTKWISRQENSDVPLVYQDELIQIRELMYKPYKDWVAFLKQLHKRLEVEIGKEVKHWRKSLSDGRKGLYGISLKNIDEIDRTRKFLLRWSLRPTEPGEVRRLEPGQRFAIDQLNHLNALKEDRLKKMANTIIMHALGYCYDVRKKKWQAKNPACQIILFEDLSNYNPYEERSRFENSKLMKWSRREIPRQVALQGEIYGLQVGEVGAQFSSRFHAKTGSPGIRCSVVTKEKLQDNRFFKNLQREGRLTLDKIAVLKEGDLYPDKGGEKFISLSKDRKLVTTHADINAAQNLQKRFWTRTHGFYKVYCKAYQVDGQTVYIPESKDQKQKIIEEFGEGYFILKDGVYEWGNAGKLKIKKGSSKQSSSELVDSDILKDSFDLASELKGEKLMLYRDPSGNVFPSDKWMAAGVFFGKLERILISKLTNQYSISTIEDDSSKQSM

SEQ ID NO: 198 - protein, 1108 aa, Bacillus sp.
  source 1..1108: note = Bacillus sp. NSP2.1
MAIRSIKLKLKTHTGPEAQNLRKGIWRTHRLLNEGVAYYMKMLLLFRQESTGERPKEELQEELICHIREQQQRNQADKNTQALPLDKALEALRQLYELLVPSSVGQSGDAQIISRKFLSPLVDPNSEGGKGTSKAGAKPTWQKKKEANDPTWEQDYEKWKKRREEDPTASVITTLEEYGIRPIFPLYTNTVTDIAWLPLQSNQFVRTWDRDMLQQAIERLLSWESWNKRVQEEYAKLKEKMAQLNEQLEGGQEWISLLEQYEENRERELRENMTAANDKYRITKRQMKGWNELYELWSTFPASASHEQYKEALKRVQQRLRGRFGDAHFFQYLMEEKNRLIWKGNPQRIHYFVARNELTKRLEEAKQSATMTLPNARKHPLWVRFDARGGNLQDYYLTAEADKPRSRRFVTFSQLIWPSESGWMEKKDVEVELALSRQFYQQVKLLKNDKGKQKIEFKDKGSGSTFNGHLGGAKLQLERGDLEKEEKNFEDGEIGSVYLNVVIDFEPLQEVKNGRVQAPYGQVLQLIRRPNEFPKVTTYKSEQLVEWIKASPQHSAGVESLASGFRVMSIDLGLRAAAATSIFSVEESSDKNAADFSYWIEGTPLVAVHQRSYMLRLPGEQVEKQVMEKRDERFQLHQRVKFQIRVLAQIMRMANKQYGDRWDELDSLKQAVEQKKSPLDQTDRTFWEGIVCDLTKVLPRNEADWEQAVVQIHRKAEEYVGKAVQAWRKRFAADERKGIAGLSMWNIEELEGLRKLLISWSRRTRNPQEVNRFERGHTSHQRLLTHIQNVKEDRLKQLSHAIVMTALGYVYDERKQEWCAEYPACQVILFENLSQYRSNLDRSTKENSTLMKWAHRSIPKYVHMQAEPYGIQIGDVRAEYSSRFYAKTGTPGIRCKKVRGQDLQGRRFENLQKRLVNEQFLTEEQVKQLRPGDIVPDDSGELFMTLTDGSGSKEVVFLQADINAAHNLQKRFWQRYNELFKVSCRVIVRDEEEYLVPKTKSVQAKLGKGLFVKKSDTAWKDVYVWDSQAKLKGKTTFTEESESPEQLEDFQEIIEEAEEAKGTYRTLFRDPSGVFFPESVWYPQKDFWGEVKRKLYGKLRERFLTKAR

SEQ ID NO: 199 - protein, 1129 aa, Alicyclobacillus acidoterrestris
MAVKSIKVKLRLDDMPEIRAGLWKLHKEVNAGVRYYTEWLSLLRQENLYRRSPNGDGEQECDKTAEECKAELLERLRARQVENGHRGPAGSDDELLQLARQLYELLVPQAIGAKGDAQQIARKFLSPLADKDAVGGLGIAKAGNKPRWVRMREAGEPGWEEEKEKAETRKSADRTADVLRALADFGLKPLMRVYTDSEMSSVEWKPLRKGQAVRTWDRDMFQQAIERMMSWESWNQRVGQEYAKLVEQKNRFEQKNFVGQEHLVHLVNQLQQDMKEASPGLESKEQTAHYVTGRALRGSDKVFEKWGKLAPDAPFDLYDAEIKNVQRRNTRRFGSHDLFAKLAEPEYQALWREDASFLTRYAVYNSILRKLNHAKMFATFTLPDATAHPIWTRFDKLGGNLHQYTFLFNEFGERRHAIRFHKLLKVENGVAREVDDVTVPISMSEQLDNLLPRDPNEPIALYFRDYGAEQHFTGEFGGAKIQCRRDQLAHMHRRRGARDVYLNVSVRVQSQSEARGERRPPYAAVFRLVGDNHRAFVHFDKLSDYLAEHPDDGKLGSEGLLSGLRVMSVDLGLRTSASISVFRVARKDELKPNSKGRVPFFFPIKGNDNLVAVHERSQLLKLPGETESKDLRAIREERQRTLRQLRTQLAYLRLLVRCGSEDVGRRERSWAKLIEQPVDAANHMTPDWREAFENELQKLKSLHGICSDKEWMDAVYESVRRVWRHMGKQVRDWRKDVRSGERPKIRGYAKDVVGGNSIEQIEYLERQYKFLKSWSFFGKVSGQVIRAEKGSRFAITLREHIDHAKEDRLKKLADRIIMEALGYVYALDERGKGKWVAKYPPCQLILLEELSEYQFNNDRPPSENNQLMQWSHRGVFQELINQAQVHDLLVGTMYAAFSSRFDARTGAPGIRCRRVPARCTQEHNPEPFPWWLNKFVVEHTLDACPLRADDLIPTGEGEIFVSPFSAEEGDFHQIHADLNAAQNLQQRLWSDFDISQIRLRCDWGEVDGELVLIPRLTGKRTADSYSNKVFYTNTGVTYYERERGKKRRKVFAQEKLSEEEAELLVEADEAREKSVVLMRDPSGIINRGNWTRQKEFWSMVNQRIEGYLVKQIRSRVPLQDSACENTGDI

SEQ ID NO: 200 - protein, 1115 aa, Alicyclobacillus hesperidum
MTVRSIRVKLAVGSPQYRDVRRGLWKTHEIMNQGVRYYCEWLVLMRQEPIYDEDEHGLTVVQRTREDIQAELLSRLRTLQSAHQHSGDMGTDEELLSLMRQLYEQLVPSSVDKNKSGDARMIARNFFNPLTNPNSQGGLGISNAGRKPKWLLKKLSGDPTWEEDYKKAMEQKQESSVSFLLLELRRFGLHPIFLPYTDTVLEVSWAPKKARQWVRKWDYDLFQQSIERMLSWESWTRRVKERFEKLVESEKKFYDENFATDPEFIKLAETLEGELQASSQGFVAVDEHAFQIRPRSMRGFDRVADEWCKLADDAPIEEYEAAIKRVQARLGRNFGSYVLFAHLAKPEYWSLWRSDPTKILRFARLRALQRAVARAKRHARLTLPDAIHHPIWIRYDAKGKNIYSYRLLIPEKRSKRYYVEFSSLIMPDGENRWAEHRNIRVPLAFSRQWERLHFSIMEDGSLCVQYRDPGVDEPLRAELGGAKIQFDRRYLIRRSSTLSAGECGPVYLNVSVDVNPAHRPDVQVLQSAKLVSVSRDTNRIYLRPENLSAYWKSQGDGTLPLRVMSVDLGVRSSAAVVICRLEHRDSVVSSGRRTATIYRIAGTDEFVAVQERAFLLRLPGEGKGTNEDAPLRDVYAQLGTIRQGIQILRSLLRLCDTKTPDERQEALHGLAQSLEPSGAWKDELHPHLVMLQGVVHDSVDNWKQKVISVHRQMERILGHAVREWKVARKNAGKPPIRRGAGGLSLRRIRQLEQERRTLVAWSNHAREPGQVVRIKRGTQVAQWLVERVNHLKEDRLKKLADLLIMTALGYVYDETKPSGHKWDKRYPPCQIILMEDLSRYRFQSDRPPSENSQLMAWSHRRLLEILKLQADLHKLIVGTVFPAFSSRFDAQSGAPGVRCRSVKKQDIENAAQGKGWLARELQRLNWTLEWLQPNDLIPTGDGELFVTPACCDRQKGIKIVHADLNAAQNLQRRFWGGHAESLCRVTCDVVERDGRRYAVPRISNAFADSFYKVFGQGVFVSTDEEDVYRWMVGEKISSRGRSRGRTSDEEAEAETWIDEAREQQGKVIALFRDASGQIHGGDWLVAKVFWGWVERLVTARLLSRMSEREAAAHKE

SEQ ID NO: 201 - protein, 1129 aa, Alicyclobacillus acidiphilus
MAVKSMKVKLRLDNMPEIRAGLWKLHTEVNAGVRYYTEWLSLLRQENLYRRSPNGDGEQECYKTAEECKAELLERLRARQVENGHCGPAGSDDELLQLARQLYELLVPQAIGAKGDAQQIARKFLSPLADKDAVGGLGIAKAGNKPRWVRMREAGEPGWEEEKAKAEARKSTDRTADVLRALADFGLKPLMRVYTDSDMSSVQWKPLRKGQAVRTWDRDMFQQAIERMMSWESWNQRVGEAYAKLVEQKSRFEQKNFVGQEHLVQLVNQLQQDMKEASHGLESKEQTAHYLTGRALRGSDKVFEKWEKLDPDAPFDLYDTEIKNVQRRNTRRFGSHDLFAKLAEPKYQALWREDASFLTRYAVYNSIVRKLNHAKMFATFTLPDATAHPIWTRFDKLGGNLHQYTFLFNEFGEGRHAIRFQKLLTVEDGVAKEVDDVTVPISMSAQLDDLLPRDPHELVALYFQDYGAEQHLAGEFGGAKIQYRRDQLNHLHARRGARDVYLNLSVRVQSQSEARGERRPPYAAVFRLVGDNHRAFVHFDKLSDYLAEHPDDGKLGSEGLLSGLRVMSVDLGLRTSASISVFRVARKDELKPNSEGRVPFCFPIEGNENLVAVHERSQLLKLPGETESKDLRAIREERQRTLRQLRTQLAYLRLLVRCGSEDVGRRERSWAKLIEQPMDANQMTPDWREAFEDELQKLKSLYGICGDREWTEAVYESVRRVWRHMGKQVRDWRKDVRSGERPKIRGYQKDVVGGNSIEQIEYLERQYKFLKSWSFFGKVSGQVIRAEKGSRFAITLREHIDHAKEDRLKKLADRIIMEALGYVYALDDERGKGKWVAKYPPCQLILLEELSEYQFNNDRPPSENNQLMQWSHRGVFQELLNQAQVHDLLVGTMYAAFSSRFDARTGAPGIRCRRVPARCAREQNPEPFPWWLNKFVAEHKLDGCPLRADDLIPTGEGEFFVSPFSAEEGDFHQIHADLNAAQNLQRRLWSDFDISQIRLRCDWGEVDGEPVLIPRTTGKRTADSYGNKVFYTKTGVTYYERERGKKRRKVFAQEELSEEEAELLVEADEAREKSVVLMRDPSGIINRGDWTRQKEFWSMVNQRIEGYLVKQIRSRVRLQESACENTGDI

SEQ ID NO: 202 - protein, 1144 aa, Alicyclobacillus macrosporangiidus
MAVKSIKVKLMLGHLPEIREGLWHLHEAVNLGVRYYTEWLALLRQGNLYRRGKDGAQECYMTAEQCRQELLVRLRDRQKRNGHTGDPGTDEELLGVARRLYELLVPQSVGKKGQAQMLASGFLSPLADPKSEGGKGTSKSGRKPAWMGMKEAGDSRWVEAKARYEANKAKDPTKQVIASLEMYGLRPLFDVFTETYKTIRWMPLGKHQGVRAWDRDMFQQSLERLMSWESWNERVGAEFARLVDRRDRFREKHFTGQEHLVALAQRLEQEMKEASPGFESKSSQAHRITKRALRGADGIIDDWLKLSEGEPVDRFDEILRKRQAQNPRRFGSHDLFLKLAEPVFQPLWREDPSFLSRWASYNEVLNKLEDAKQFATFTLPSPCSNPVWARFENAEGTNIFKYDFLFDHFGKGRHGVRFQRMIVMRDGVPTEVEGIVVPIAPSRQLDALAPNDAASPIDVFVGDPAAPGAFRGQFGGAKIQYRRSALVRKGRREEKAYLCGFRLPSQRRTGTPADDAGEVFLNLSLRVESQSEQAGRRNPPYAAVFHISDQTRRVIVRYGEIERYLAEHPDTGIPGSRGLTSGLRVMSVDLGLRTSAAISVFRVAHRDELTPDAHGRQPFFFPIHGMDHLVALHERSHLIRLPGETESKKVRSIREQRLDRLNRLRSQMASLRLLVRTGVLDEQKRDRNWERLQSSMERGGERMPSDWWDLFQAQVRYLAQHRDASGEAWGRMVQAAVRTLWRQLAKQVRDWRKEVRRNADKVKIRGIARDVPGGHSLAQLDYLERQYRFLRSWSAFSVQAGQVVRAERDSRFAVALREHIDNGKKDRLKKLADRILMEALGYVYVTDGRRAGQWQAVYPPCQLVLLEELSEYRFSNDRPPSENSQLMVWSHRGVLEELIHQAQVHDVLVGTIPAAFSSRFDARTGAPGIRCRRVPSIPLKDAPSIPIWLSHYLKQTERDAAALRPGELIPTGDGEFLVTPAGRGASGVRVVHADINAAHNLQRRLWENFDLSDIRVRCDRREGKDGTVVLIPRLTNQRVKERYSGVIFTSEDGVSFTVGDAKTRRRSSASQGEGDDLSDEEQELLAEADDARERSVVLFRDPSGFVNGGRWTAQRAFWGMVHNRIETLLAERFSVSGAAEKVRG

SEQ ID NO: 203 - protein, 1027 aa, Sulfobacillus thermosulfidooxidans
RQSREDASPQIIISASDLKADLLYHARQQQKEHVPRITGSDAEVLGALRQVYELIVPSSVGKSGDSKTIARKFLSPLTDPDSAGGRDQSASGRKPTWTKMKAEGNPLWEEKFRQWKDRKDNDPTPFVLNQLADYGLLPLIRLFTDVGENIFDPKKPGQFVRPWDRSMFQQAIERLMSWESWNQRVRQEWEALTQKHSAFYREQFTAEPDAALYRVAQSLEEEMRKEHQGFATDAPEAFRIRRVALKGFDRLLERWQKTLGKNGQSATLLDDIRRVQSDLGDKFGSAPLYQKLVDERWQRLWTVDPTFLQRYAAFNDLTQRLQRAKRVANLTLPDAVAHPIWSRYEGPNASSGNRYHIHLPTTGQPSSVTFDRILWPDGDGGWYERKRVTVFLRPSHQVDRIREAPTDSVVDNFPLVVEDQSARTILRASWGGAKLEYDRNRLPRQLKKGVPDSIYLSLTLNLDTTKPSGLFHMQQNGRVWIRKDVVMQYYNEIPGDNVQFKPLYVMSVDLGIRSAAAVSIFSVQLKTGIEEHRLTYPVADCPGLVAVHERSVLLTMPGERREQRDRRYEQQRQGLRELRTDMRGMNDLLRGAYVDGDRREEFLARLSKLEETSPELWEPVYRSLNDSKMAPAAEWERLVVYCHRQVEQSLSSRIQNLRSGRSAYRMSGGLSLDHVQDLERIRGIIASWTNHPRIPGSVVRWQQGRSHTVALGRHILELKRDRVKKVANYLIMTALGYAYDSKRARGEKWVRRYPSCHLMVFEDLTRYRFRTDRPRSENRQLMRWTHQELIAVTGIQAEPHGILVGTMYAGFSSRFDAVTKAPGVRGATVRQILRTRGMVRLKEIAADVGVDINTLRPHDVLPTGDGEYLLSVVRHRDSYRLKQVHADINAAHNLQRRLWTQDEVFRVSCRLALNSERVVATPPPSYNKRYGKGFFEKGDNGVYIWKTGGKIKISDMLEEDMDIPEDTAELLRGNSVTLFRDPSGTIAGGNWLEAKEFWGRVNSLVNKGVRDKILGGIPVDNSSAHAE

SEQ ID NO: 204 - protein, 1070 aa, Spirochaeta sp.
MGLLLPSLSRTVNVTIHLILHPRKKGSRHREYAVMLDHAVRKIFLAHNWIKRAEAERQKFEADLYKIDRVPQEARDWLDEFCRERTESTGSIDGYHIRRKAVLGWEALVEAWDQKDCLSVEDRIAAARDLQDNPGMDKFGDIWLYEALASAPCVWQKDGEPNAQILLDYVDAGEAEYKRSHYKVPAYRHPDPLLHPIFCDFGQSRWSISFDIHEFKKNGEKNPVNIHALTMGLVSKKRIVKTELKWSSKRLNSNLALSLESPEDAIEVSRATRLGRAAVGASQDRAVNIAGLFESAGWNGRLQAPRKQLEALAKLEEDKSAEALAKALRNRIKWFITFSPKLQPHGPWMEYAERFSGEAPSRAAVIKGKYTVIHQDKTRRRPLAKLHLCRMPGLRVLSVDLGHRHAAACAVWETLSSESMEKKCREAGCLPPAPEDLYLHLKKKNKTAVYRRIGGNFLPDGNEHPAPWAKLDRQFIIDLQGEEGCTRMALAGEIWQVHCMEKVFGRSIPLVDRLVRAGWGEKNKQPEILQELKQKGWVPLEVSKTNTGYHYSLCVDSLMTLAVNTVRFALRRHACRARIAYYMEGGAIPEGGLPENSGNKDFIVEALMLWYELATDSRWNGSWEANFWDENFDKKLAEIQDAVNEREGDKAKIIKQKERKELLKKEFIPLAEGLLENSRRISIASQWRMVWNEEDAIWQSELRSLRDWILPKGTRGKKRTIRHVGGLSLSRLAVIKSLYRVQKSFYTRMKPEGEPMDGTMAVGEGFGQKILDDLETMKEQRVKQLASRVVEAALGTGRIKKPENNKTPKRPFTAVDEPCHAVVIENLTHYRPENKRTRRENRQLMTWSSSKVKKYLFESCQLHGLYLFEVQASYTSRQDSRTGAPGVRCSELSVKKFLESPFRQREIAHAEENMAQENPCNRYLIALHNKWKNREYDKTAPPLRIPHWGGEIFVSALTGNTLQADLNAAANIGLQALLDPDWPGRWWYVPAVKGCDGRRIPHSKCSGAACLDNWRVGLKNNLYTGVRTPLPGKNKGSTSGEDVHKSNAVEKSTINLWRDISVLPLTEGQW

SEQ ID NO: 205 - protein, 1108 aa, Bacillus sp.
  source 1..1108: note = Bacillus hisashii strain C4 v4
MATRSFILKIEPNEEVKKGLWKTHEVLNHGIAYYMNILKLIRQEAIYEHHEQDPKNPKKVSKAEIQAELWDFVLKMQKCNSFTHEVDKDEVFNILRELYEELVPSSVEKKGEANQLSNKFLYPLVDPNSQSGKGTASSGRKPRWYNLKIAGDPSWEEEKKKWEEDKKKDPLAKILGKLAEYGLIPLFIPYTDSNEPIVKEIKWMEKSRNQSVRRLDKDMFIQALERFLSWESWNLKVKEEYEKVEKEYKTLEERIKEDIQALKALEQYEKERQEQLLRDTLNTNEYRLSKRGLRGWREIIQKWLKMDENEPSEKYLEVFKDYQRKHPREAGDYSVYEFLSKKENHFIWRNHPEYPYLYATFCEIDKKKKDAKQQATFTLADPINHPLWVRFEERSGSNLNKYRILTEQLHTEKLKKKLTVQLDRLIYPTESGGWEEKGKVDIVLLPSRQFYNQIFLDIEEKGKHAFTYKDESIKFPLKGTLGGARVQFDRDHLRRYPHKVESGNVGRIYFNMTVNIEPTESPVSKSLKIHRDDFPKVVNFKPKELTEWIKDSKGKKLKSGIESLEIGLRVMSIDLGQRQAAAASIFEVVDQKPDIEGKLFFPIKGTELYAVHRASFNIKLPGETLVKSREVLRKAREDNLKLMNQKLNFLRNVLHFQQFEDITEREKRVTKWISRQENSDVPLVYQDELIQIRELMYKPYKDWVAFLKQLHKRLEVEIGKEVKHWRKSLSDGRKGLYGISLKNIDEIDRTRKFLLRWSLRPTEPGEVRRLEPGQRFAIDQLNHLNALKEDRLKKMANTIIMHALGYCYDVRKKKWQAKNPACQIILFEDLSNYNPYGERSRFENSRLMKWSRREIPRQVALQGEIYGLQVGEVGAQFSSRFHAKTGSPGIRCRVVTKEKLQDNRFFKNLQREGRLTLDKIAVLKEGDLYPDKGGEKFISLSKDRKCVTTHADINAAQNLQKRFWTRTHGFYKVYCKAYQVDGQTVYIPESKDQKQKIIEEFGEGYFILKDGVYEWVNAGKLKIKKGSSKQSSSELVDSDILKDSFDLASELKGEKLMLYRDPSGNVFPSDKWMAAGVFFGKLERILISKLTNQYSISTIEDDSSKQSM

SEQ ID NO: 206 - protein, 1252 aa, unidentified
MTKLRHRQKKLTHDWAGSKKREVLGSNGKLQNPLLMPVKKGQVTEFRKAFSAYARATKGEMTDGRKNMFTHSFEPFKTKPSLHQCELADKAYQSLHSYLPGSLAHFLLSAHALGFRIFSKSGEATAFQASSKIEAYESKLASELACVDLSIQNLTISTLFNALTTSVRGKGEETSADPLIARFYTLLTGKPLSRDTQGPERDLAEVISRKIASSFGTWKEMTANPLQSLQFFEEELHALDANVSLSPAFDVLIKMNDLQGDLKNRTIVFDPDAPVFEYNAEDPADIIIKLTARYAKEAVIKNQNVGNYVKNAITTTNANGLGWLLNKGLSLLPVSTDDELLEFIGVERSHPSCHALIELIAQLEAPELFEKNVFSDTRSEVQGMIDSAVSNHIARLSSSRNSLSMDSEELERLIKSFQIHTPHCSLFIGAQSLSQQLESLPEALQSGVNSADILLGSTQYMLTNSLVEESIATYQRTLNRINYLSGVAGQINGAIKRKAIDGEKIHLPAAWSELISLPFIGQPVIDVESDLAHLKNQYQTLSNEFDTLISALQKNFDLNFNKALLNRTQHFEAMCRSTKKNALSKPEIVSYRDLLARLTSCLYRGSLVLRRAGIEVLKKHKIFESNSELREHVHERKHFVFVSPLDRKAKKLLRLTDSRPDLLHVIDEILQHDNLENKDRESLWLVRSGYLLAGLPDQLSSSFINLPIITQKGDRRLIDLIQYDQINRDAFVMLVTSAFKSNLSGLQYRANKQSFVVTRTLSPYLGSKLVYVPKDKDWLVPSQMFEGRFADILQSDYMVWKDAGRLCVIDTAKHLSNIKKSVFSSEEVLAFLRELPHRTFIQTEVRGLGVNVDGIAFNNGDIPSLKTFSNCVQVKVSRTNTSLVQTLNRWFEGGKVSPPSIQFERAYYKKDDQIHEDAAKRKIRFQMPATELVHASDDAGWTPSYLLGIDPGEYGMGLSLVSINNGEVLDSGFIHINSLINFASKKSNHQTKVVPRQQYKSPYANYLEQSKDSAAGDIAHILDRLIYKLNALPVFEALSGNSQSAADQVWTKVLSFYTWGDNDAQNSIRKQHWFGASHWDIKGMLRQPPTEKKPKPYIAFPGSQVSSYGNSQRCSCCGRNPIEQLREMAKDTSIKELKIRNSEIQLFDGTIKLFNPDPSTVIERRRHNLGPSRIPVADRTFKNISPSSLEFKELITIVSRSIRHSPEFIAKKRGIGSEYFCAYSDCNSSLNSEANAAANVAQKFQKQLFFEL

SEQ ID NO: 207 - protein, 1050 aa, unidentified
MRSNYHGGRNARQWRKQISGLARRTKETVFTYKFPLETDAAEIDFDKAVQTYGIAEGVGHGSLIGLVCAFHLSGFRLFSKAGEAMAFRNRSRYPTDAFAEKLSAIMGIQLPTLSPEGLDLIFQSPPRSRDGIAPVWSENEVRNRLYTNWTGRGPANKPDEHLLEIAGEIAKQVFPKFGGWDDLASDPDKALAAADKYFQSQGDFPSIASLPAAIMLSPANSTVDFEGDYIAIDPAAETLLHQAVSRCAARLGRERPDLDQNKGPFVSSLQDALVSSQNNGLSWLFGVGFQHWKEKSPKELIDEYKVPADQHGAVTQVKSFVDAIPLNPLFDTTHYGEFRASVAGKVRSWVANYWKRLLDLKSLLATTEFTLPESISDPKAVSLFSGLLVDPQGLKKVADSLPARLVSAEEAIDRLMGVGIPTAADIAQVERVADEIGAFIGQVQQFNNQVKQKLENLQDADDEEFLKGLKIELPSGDKEPPAINRISGGAPDAAAEISELEEKLQRLLDARSEHFQTISEWAEENAVTLDPIAAMVELERLRLAERGATGDPEEYALRLLLQRIGRLANRVSPVSAGSIRELLKPVFMEEREFNLFFHNRLGSLYRSPYSTSRHQPFSIDVGKAKAIDWIAGLDQISSDIEKALSGAGEALGDQLRDWINLAGFAISQRLRGLPDTVPNALAQVRCPDDVRIPPLLAMLLEEDDIARDVCLKAFNLYVSAINGCLFGALREGFIVRTRFQRIGTDQIHYVPKDKAWEYPDRLNTAKGPINAAVSSDWIEKDGAVIKPVETVRNLSSTGFAGAGVSEYLVQAPHDWYTPLDLRDVAHLVTGLPVEKNITKLKRLTNRTAFRMVGASSFKTHLDSVLLSDKIKLGDFTIIIDQHYRQSVTYGGKVKISYEPERLQVEAAVPVVDTRDRTVPEPDTLFDHIVAIDLGERSVGFAVFDIKSCLRTGEVKPIHDNNGNPVVGTVAVPSIRRLMKAVRSHRRRRQPNQKVNQTYSTALQNYRENVIGDVCNRIDTLMERYNAFPVLEFQIKNFQAGAKQLEIVYGS

SEQ ID NO: 208 - protein, 1273 aa, unidentified
MKKFELKQNFRNNYSGKTLRNFRQTLAQIANKKSSDSILTIKFKLDCSKTGKLPKYENLISLYDTIEDIKKGTLSYYLFTLIVSGFKFFGSASQAKAFSTKDIFKDNDFYNQFKIQSHLDLPDFVPSKIYQRLKKNVRSTNGKDNAFKASVIVAEYRKEIGKLKNKDESSEHQCEELFKKIGTALETRFSSWQDLINNCSTGCEIIDEILNDSFGTLPSIKKMVLASTTQSSDGEQDGIAIAYDPDSTFIKSDELLNPYFAVATILKSMPPEIQQDKKSAYVKANLTTPTHNALSWIFGKGLTLFQTESTEKLCAMFNVSDKRVIEQVQDAAKAVKLPAELDLNHCTLKFQDFRSSLGGHLDSWTTNYLKRLDELNDLLLNLPKNLSLPDIFMIDGKDFIEYSGCNRDEIQQMIDFVVNEQNRIKLQESLNALLGKGNNQICSDDISTVKDFSEIVNSLHSFVQQIDNSLEQSSNEANSIFSELKKKIEKNEKWDIWKNNLKKIPKLNKLSGGVPDAWKEIREIEQKFHEISENQKKHFTEVMEWIDAGNGTIDIFESRFKYDELLKKSKKNNLQSADELAFRSVLNKLGRFARQGNDLVCEKIKNWFKEQNIFDSSKDFNRYFINQKGFIFKHPSSKKDNSPYNLSANLLEKRYEVTNTVGALLEQCESDPAIVNDPFSMRSLVEFRALWFSINISGISKEQHIPTKIAQPKLDDSTYQESVSPTLKYRLEKEQITSSELNSIFTVYKSLLSGLSIRLSRNSFYLRTKFSWIGNNSLIYCPKETTWKIPAAYFKSDLWNEYKDKQILIVNEEYDVDVVKTFESVYKIVKSKDNNEKNRILPLLKQLPHDWMFKLPFGASNAEKCKVLKLEKNNKKFKPLSVSKDSLARLSGPSTYFNQIDEIMMNDESELSEMTLLADEPVRQQMSNGKIEIIPDDYVMSLAIPITRSLKKGNTESFPFKNIVSIDQGEAGFAYAVFKLSDCGNERAEPIATGLIPIPSIRRLIHSVKKYRGKKQRIQNFNQKFDSTMFTLRENVTGDICGLIVALMKKYNAFPILEKQVGNLESGSKQLMLVYKAVNSKFLAAKVDMQNDQRRSWWYQGNSWNTPILRISNPNQSNNKNIVKNINGKKYEELKIYPGYSVSAYMTSCICHVCGRNALELLKNDDSTGKVKKYQINQDGEVTIGGEVIKLYRKPDRLTPVKNLAKKGNRERTYASINERAPMSKDTTQSRYFCVFKNCPCHNKEQHADVNAAINIGRRFLKDCILDDNKEKD

SEQ ID NO: 209 - protein, 1258 aa, unidentified
MNARDWRKHVGVLAQQHKETTRTYTFPLDTTGSAIDFDAALQAYNAVEGVGYGSLLGLACAVHLSGFRLFSTGKEAATFRNRARYPNAAFQAALRKELGTTITTLTPETLDRLFSSRPKRRNGVPLPWNQDSIRDRLYTNWVKPRPGDTPDAVLFQIATGIAQEITEDVSSWTDLAKNSDRGLKAAHRYFARVGGFPAFDNLTPPATVQPTDTTIDYDPNAPFHLVSHADQTLIHQSISLCAHRIRQEDPALDPNKSGFIKQLQNNFLSQTFYGLSWLFGAGYVHFRECTANDLAIQYGIPNNCRDGIHQIKSFADAILPNTFFEKKHYRKDSRSVGKKAKSWISNYWQRLLQLQTWVDDHTWVTLPQELTEAQFKPLFRGLLVDAVELMAIAERLPQRLADCRDSLDCLMGKGPQAATKNDVEIVEKVREEIESFVGQIEQLGNQLRHQLENENNDQVHRDNLHQLKNRLPLDLRRPQALNKISGGVPDVAKSIRGLETQLDQVLKERRSHFGRLTKWAKECGITLDPLQPLIESEKQRVAERGSAHDAKELAIRLLLQRIGRLGHRLSPTNATAIQELLRPVFAVKREFNLFFHNHMGALYRSPYSTSRHQPFQINVDVAHGTDWIGTIETLIQNLFTQIQDDALLRDLVQLEGFVFSHKLRALPGVIPSELARPNNLQQMGLPALLLVLLQADQVHRETVLRVFNLYGSAINGYLFQALRPGFIVRAGFQRLETKKLRYVPKAQSWQYPDRLHHAKSAIKNSLSAGWIKKNHQGAILPQKTLTALVKQKSLKDTGVPEYLVQAPHDWYVPIDLRGPAIPIEGLTVGTEGPELTQLGPMKDDCAFRAIGPSSFKSKIDAGLLPQDVKYGDMTLIFDQHYQQSISFANGTFSIQYQPTSLQVKAAIPVVDKRPRDTRNNSHLYDRIVAIDLGERKIGYAIFDLKQVLKSEQLEPMREDGKPLIGSISIRSIRGLMKAVQTHRNRRQPNYRIDQTYSKALMHYRESVIGDVCNAIDTLCARYGGFPVLESSVRNFEVGSAQLKTVYGSVSRRYTWSAVDAHKNQRQQYWLGGTKDKIPIWTHPYLMTREWDEKNSKWSNRSKPLKMHPGVEVHPAGTSQICHQCKRNPIGALWNVADTVVLDDQGQLDLDDGTIRLNSGYIDTTEIKRARRKKIRLPENKPLTGSHKTSHVRAVARRNLRQPPKSTRAKDTTQSRYTCLYVDCGHECHADENAAINIGRKYLQERIHIEASRQALSTR

SEQ ID NO: 210 - protein, 1269 aa, unidentified
MVAGLKKIKRDGVTMKSNYHGGVKARAWRKRIGGLARRQKETVFTYKFPLETEEAGIDFDKAVQTYGIAEGISQGSLIGLVCAFHLSGFRLFSKADETKAFCNQGRYPNQAFAEKLRNELSVTLPKLSPQSLDVLFQSSPKSKNGVAPEWSKNAIRNRLYTNWTGKGAGTNPDEHLLEIAEDIAAEIDSDLDGWKDLEEHPEKGLSAADRYFQAQGDFPSLTGLPPSVPLTPQNSTVAFEGDPVCLNPSDNTLLHQAVARCAGRILQEQPNLSPDKNRFINQLQDELVSSQNNGLSWLFGVGFKYWKEMSVDQLADDYKVKSTDLDALKQVKSFIDAIPLNPLFDTPHYGEFRASVAGKMRSWVKNYWKRLLDLKSQLGTANINLPEGLDEQRAENLFSGLLIDSKGLRQVTDKLPSRLKKAEDTIDRLMGDGNPTSDDIEQVETVAAEISAFIGQVEQFNNQLEQRLENPLEGDDETFLKQLKIDLPAEFKKPPAINRISGGSPDPTAEIAELEEKLDRLMSARKEHYETIAEWASANKVTLDPMEAMTTLEAQRLTERGAEGDQEEFALRLLLQRIGRLANRLSPQGATAIRDLLRPVFTEKREFNLFFHNRMGSLYRSPYSTSRHQPFTIDVAVAKNTDWMDALDGIAETIMKGLSQAGDELSLRQLEEDEVSREVCLKAFNLYVSAINGCLFRALREGFIVRTKFQRLERDVLSYVPKTKLWNYPQRLDTARGPIHSALAAAWINKEGSVIDPVETVTALSDTGFSDDGIPEYLVQAPHDWYLRDWINISGFSLSQRLRGLPDTVPGELALVRSADDVRIPPMLALTPIDLRDISKPVSGLPVKKNITGLKRQKKQTAFRMVGPSSFKSHLDSTLLSEEVKLGDFTLIFDQYYKQRVSYNGRVKITFEPDRLHVEAAVPVIDKRVRPSTEEDALFDHLLAIDLGEKRVGYAVYDIKACLRTGDIKPLEDGDGKPIVGSVAVPSIRRLMKAVRSHRQQRQPNQKVNQTYSTALMNYRENVIGDVCNRIDTLMEKYNAFPVLESSVMNFEAGSRQLEMVYGSVLHRYTYSKIDAHTAKRKEYWYTGEYWDHPYLMAHKWNERTRSYSGSLSALTLYPGVMVHPAGTSQRCHQCKRNPMVEIKQLTGQVEINADGSLELDDGTICLYEGYDYSPEEYKKAKREKRRLDPNVPLSGRHQAKHVSAVAKRNLRRPTVSMMSGDTTQARYVCLYTDCDFTGHADENAAINIGWKYLTERIALSESKDKAGV

SEQ ID NO: 211 - protein, 1210 aa, unidentified
  source 1..1210: note = Uncultured Parcubacteria group bacterium
MSKRHPRISGVKGYRLHAQRLEYTGKSGAMRTIKYPLYSSPSGGRTVPREIVSAINDDYVGLYGLSNFDDLYNAEKRNEEKVYSVLDFWYDCVQYGAVFSYTAPGLLKNVAEVRGGSYELTKTLKGSHLYDELQIDKVIKFLNKKEISRANGSLDKLKKDIIDCFKAEYRERHKDQCNKLADDIKNAKKDAGASLGERQKKLFRDFFGISEQSENDKPSFTNPLNLTCCLLPFDTVNNNRNRGEVLFNKLKEYAQKLDKNEGSLEMWEYIGIGNSGTAFSNFLGEGFLGRLRENKITELKKAMMDITDAWRGQEQEEELEKRLRILAALTIKLREPKFDNHWGGYRSDINGKLSSWLQNYINQTVKIKEDLKGHKKDLKKAKEMINRFGESDTKEEAVVSSLLESIEKIVPDDSADDEKPDIPAIAIYRRFLSDGRLTLNRFVQREDVQEALIKERLEAEKKKKPKKRKKKSDAEDEKETIDFKELFPHLAKPLKLVPNFYGDSKRELYKKYKNAAIYTDALWKAVEKIYKSAFSSSLKNSFFDTDFDKDFFIKRLQKIFSVYRRFNTDKWKPIVKNSFAPYCDIVSLAENEVLYKPKQSRSRKSAAIDKNRVRLPSTENIAKAGIALARELSVAGFDWKDLLKKEEHEEYIDLIELHKTALALLLAVTETQLDISALDFVENGTVKDFMKTRDGNLVLEGRFLEMFSQSIVFSELRGLAGLMSRKEFITRSAIQTMNGKQAELLYIPHEFQSAKITTPKEMSRAFLDLAPAEFATSLEPESLSEKSLLKLKQMRYYPHYFGYELTRTGQGIDGGVAENALRLEKSPVKKREIKCKQYKTLGRGQNKIVLYVRSSYYQTQFLEWFLHRPKNVQTDVAVSGSFLIDEKKVKTRWNYDALTVALEPVSGSERVFVSQPFTIFPEKSAEEEGQRYLGIDIGEYGIAYTALEITGDSAKILDQNFISDPQLKTLREEVKGLKLDQRRGTFAMPSTKIARIRESLVHSLRNRIHHLALKHKAKIVYELEVSRFEEGKQKIKKVYATLKKADVYSEIDADKNLQTTVWGKLAVASEISASYTSQFCGACKKLWRAEMQVDETITTQELIGTVRVIKGGTLIDAIKDFMRPPIFDENDTPFPKYRDFCDKHHISKKMRGNSCLFICPFCRANADADIQASQTIALLRYVKEEKKVEDYFERFRKLKNIKVLGQMKKI

SEQ ID NO: 212 - DNA, 184 bp, synthetic construct
  source 1..184: mol_type = other DNA
gctattctcgcagctcaccagttttagagctagaaatagcaagttaaaataaggctagtccgttatcaacttgaaaaagtggcaccgagtcggtgcgacgagcgcggcgatatcatcatccatggccggatgatcctgacgacggagaccgccgtcgtcgacaagccggcctgagctgcgagaa

SEQ ID NO: 213 - DNA, 194 bp, synthetic construct
  source 1..194: mol_type = other DNA
gctattctcgcagctcaccagtttgagagctatgctggaaacagcatagcaagttcaaataaggctagtccgttatcaacttgaaaaagtggcaccgagtcggtgcgacgagcgcggcgatatcatcatccatggccggatgatcctgacgacggagaccgccgtcgtcgacaagccggcctgagctgcgagaa

SEQ ID NO: 214 - DNA, 179 bp, synthetic construct
  source 1..179: mol_type = other DNA
gctattctcgcagctcaccagttttagagctagaaatagcaagttaaaataaggctagtccgttatcaacttgaaaaagtggcaccgagtcggtgcgagtcggtgcgacgagcgcggcgatatcatcatccatggcacaattaacatctcaatcaaggtaaatgcttgagctgcgagaa

SEQ ID NO: 215 - DNA, 179 bp, synthetic construct
  source 1..179: mol_type = other DNA
gctattctcgcagctcaccagttttagagctagaaatagcaagttaaaataaggctagtccgttatcaacttgaaaaagtggcaccgagtcggtgcgagtcggtgcgacgagcgcggcgatatcatcatccatggagcatttaccttgattgagatgttaattgtgtgagctgcgagaa

SEQ ID NO: 216 - DNA, 182 bp, synthetic construct
  source 1..182: mol_type = other DNA
gctattctcgcagctcaccagttttagagctagaaatagcaagttaaaataaggctagtccgttatcaacttgaaaaagtggcaccgagtcggtgcgagtcggtgcgacgagcgcggcgatatcatcatccatggcaggtttttgacgaaagtgatccagatgatccagtgagctgcgagaa

SEQ ID NO: 217 - DNA, 182 bp, synthetic construct
  source 1..182: mol_type = other DNA
gctattctcgcagctcaccagttttagagctagaaatagcaagttaaaataaggctagtccgttatcaacttgaaaaagtggcaccgagtcggtgcgagtcggtgcgacgagcgcggcgatatcatcatccatggctggatcatctggatcactttcgtcaaaaacctgtgagctgcgagaa

SEQ ID NO: 218 - DNA, 96 bp, synthetic construct
  source 1..96: mol_type = other DNA
gaagccggccttgcacatgcgttttagagctagaaatagcaagttaaaataaggctagtccgttatcaacttgaaaaagtggcaccgagtcggtgc

SEQ ID NO: 219 - DNA, 164 bp, synthetic construct
  source 1..164: mol_type = other DNA
gaagccggccttgcacatgcgttttagagctagaaatagcaagttaaaataaggctagtccgttatcaacttgaaaaagtggcaccgagtcggtgcatatcatcatccatggtaccgttcgtatagcatacattatacgaagttattgagctgcgagaatagcc

SEQ ID NO: 220 - DNA, 172 bp, synthetic construct
  source 1..172: mol_type = other DNA
gaagccggccttgcacatgcgttttagagctagaaatagcaagttaaaataaggctagtccgttatcaacttgaaaaagtggcaccgagtcggtgcgacgagcgcggcgatatcatcatccatggtaccgttcgtatagcatacattatacgaagttattgagctgcgagaa

SEQ ID NO: 221 - DNA, 189 bp, synthetic construct
  source 1..189: mol_type = other DNA
gctattctcgcagctcaccagttttagagctagaaatagcaagttaaaataaggctagtccgttatcaacttgaaaaagtggcaccgagtcggtgctcgacgacgagcgcggcgatatcatcatccatggccggatgatcctgacgacggagaccgccgtcgtcgacaagccggcctgagctgcgagaa

SEQ ID NO: 222 - DNA, 181 bp, synthetic construct
  source 1..181: mol_type = other DNA
gctattctcgcagctcaccagttttagagctagaaatagcaagttaaaataaggctagtccgttatcaacttgaaaaagtggcaccgagtcggtgcgagcgcggcgatatcatcatccatggccggatgatcctgacgacggagaccgccgtcgtcgacaagccggcctgagctgcgagaa

SEQ ID NO: 223 - DNA, 178 bp, synthetic construct
  source 1..178: mol_type = other DNA
gctattctcgcagctcaccagttttagagctagaaatagcaagttaaaataaggctagtccgttatcaacttgaaaaagtggcaccgagtcggtgccgcggcgatatcatcatccatggccggatgatcctgacgacggagaccgccgtcgtcgacaagccggcctgagctgcgagaa

SEQ ID NO: 224 - DNA, 175 bp, synthetic construct
  source 1..175: mol_type = other DNA
gctattctcgcagctcaccagttttagagctagaaatagcaagttaaaataaggctagtccgttatcaacttgaaaaagtggcaccgagtcggtgcggcgatatcatcatccatggccggatgatcctgacgacggagaccgccgtcgtcgacaagccggcctgagctgcgagaa

SEQ ID NO: 225 - DNA, 171 bp, synthetic construct
  source 1..171: mol_type = other DNA
gctattctcgcagctcaccagttttagagctagaaatagcaagttaaaataaggctagtccgttatcaacttgaaaaagtggcaccgagtcggtgcatatcatcatccatggccggatgatcctgacgacggagaccgccgtcgtcgacaagccggcctgagctgcgagaa

SEQ ID NO: 226 - DNA, 194 bp, synthetic construct
  source 1..194: mol_type = other DNA
gctattctcgcagctcaccagttttagagctagaaatagcaagttaaaataaggctagtccgttatcaacttgaaaaagtggcaccgagtcggtgctcgacgacgagcgcggcgatatcatcatccatggccggatgatcctgacgacggagaccgccgtcgtcgacaagccggcctgagctgcgagaatagcc

SEQ ID NO: 227 - DNA, 189 bp, synthetic construct
  source 1..189: mol_type = other DNA
gctattctcgcagctcaccagttttagagctagaaatagcaagttaaaataaggctagtccgttatcaacttgaaaaagtggcaccgagtcggtgcgacgagcgcggcgatatcatcatccatggccggatgatcctgacgacggagaccgccgtcgtcgacaagccggcctgagctgcgagaatagcc

SEQ ID NO: 228 - DNA, 176 bp, synthetic construct
  source 1..176: mol_type = other DNA
gctattctcgcagctcaccagttttagagctagaaatagcaagttaaaataaggctagtccgttatcaacttgaaaaagtggcaccgagtcggtgcatatcatcatccatggccggatgatcctgacgacggagaccgccgtcgtcgacaagccggcctgagctgcgagaatagcc

SEQ ID NO: 229 - DNA, 194 bp, synthetic construct
  source 1..194: mol_type = other DNA
gctgtctccgccgcccgccagttttagagctagaaatagcaagttaaaataaggctagtccgttatcaacttgaaaaagtggcaccgagtcggtgcctgcccatccgcggcggcacgggggtcgcagtcgccatgccggatgatcctgacgacggagaccgccgtcgtcgacaagccggcccgggcggcggaga

SEQ ID NO: 230 - DNA, 189 bp, synthetic construct
  source 1..189: mol_type = other DNA
gctgtctccgccgcccgccagttttagagctagaaatagcaagttaaaataaggctagtccgttatcaacttgaaaaagtggcaccgagtcggtgccatccgcggcggcacgggggtcgcagtcgccatgccggatgatcctgacgacggagaccgccgtcgtcgacaagccggcccgggcggcggaga

SEQ ID NO: 231 - DNA, 184 bp, synthetic construct
  source 1..184: mol_type = other DNA
gctgtctccgccgcccgccagttttagagctagaaatagcaagttaaaataaggctagtccgttatcaacttgaaaaagtggcaccgagtcggtgcgcggcggcacgggggtcgcagtcgccatgccggatgatcctgacgacggagaccgccgtcgtcgacaagccggcccgggcggcggaga

SEQ ID NO: 232 - DNA, 179 bp, synthetic construct
  source 1..179: mol_type = other DNA
gctgtctccgccgcccgccagttttagagctagaaatagcaagttaaaataaggctagtccgttatcaacttgaaaaagtggcaccgagtcggtgcggcacgggggtcgcagtcgccatgccggatgatcctgacgacggagaccgccgtcgtcgacaagccggcccgggcggcggaga

SEQ ID NO: 233 - DNA, 174 bp, synthetic construct
  source 1..174: mol_type = other DNA
gctgtctccgccgcccgccagttttagagctagaaatagcaagttaaaataaggctagtccgttatcaacttgaaaaagtggcaccgagtcggtgcgggggtcgcagtcgccatgccggatgatcctgacgacggagaccgccgtcgtcgacaagccggcccgggcggcggaga

SEQ ID NO: 234 - DNA, 199 bp, synthetic construct
  source 1..199: mol_type = other DNA
gctgtctccgccgcccgccagttttagagctagaaatagcaagttaaaataaggctagtccgttatcaacttgaaaaagtggcaccgagtcggtgcctgcccatccgcggcggcacgggggtcgcagtcgccatgccggatgatcctgacgacggagaccgccgtcgtcgacaagccggcccgggcggcggagacagcg

SEQ ID NO: 235 - DNA, 194 bp, synthetic construct
  source 1..194: mol_type = other DNA
gctgtctccgccgcccgccagttttagagctagaaatagcaagttaaaataaggctagtccgttatcaacttgaaaaagtggcaccgagtcggtgccatccgcggcggcacgggggtcgcagtcgccatgccggatgatcctgacgacggagaccgccgtcgtcgacaagccggcccgggcggcggagacagcg

SEQ ID NO: 236 - DNA, 189 bp, synthetic construct
  source 1..189: mol_type = other DNA
gctgtctccgccgcccgccagttttagagctagaaatagcaagttaaaataaggctagtccgttatcaacttgaaaaagtggcaccgagtcggtgcgcggcggcacgggggtcgcagtcgccatgccggatgatcctgacgacggagaccgccgtcgtcgacaagccggcccgggcggcggagacagcg

SEQ ID NO: 237 - DNA, 184 bp, synthetic construct
  source 1..184: mol_type = other DNA
gctgtctccgccgcccgccagttttagagctagaaatagcaagttaaaataaggctagtccgttatcaacttgaaaaagtggcaccgagtcggtgcggcacgggggtcgcagtcgccatgccggatgatcctgacgacggagaccgccgtcgtcgacaagccggcccgggcggcggagacagcg

SEQ ID NO: 238 - DNA, 179 bp, synthetic construct
  source 1..179: mol_type = other DNA
gctgtctccgccgcccgccagttttagagctagaaatagcaagttaaaataaggctagtccgttatcaacttgaaaaagtggcaccgagtcggtgcgggggtcgcagtcgccatgccggatgatcctgacgacggagaccgccgtcgtcgacaagccggcccgggcggcggagacagcg

SEQ ID NO: 239 - DNA, 96 bp, synthetic construct
  source 1..96: mol_type = other DNA
gcgtggtggggccgccagcggttttagagctagaaatagcaagttaaaataaggctagtccgttatcaacttgaaaaagtggcaccgagtcggtgc

SEQ ID NO: 240 - DNA, 180 bp, synthetic construct
  source 1..180: mol_type = other DNA
gctattctcgcagctcaccagttttagagctagaaatagcaagttaaaataaggctagtccgttatcaacttgaaaaagtggcaccgagtcggtgcgacgagcgcggcgatatcatcatccatggggatgatcctgacgacggagaccgccgtcgtcgacaagccggtgagctgcgagaa

SEQ ID NO: 241 - DNA, 178 bp, synthetic construct
  source 1..178: mol_type = other DNA
gctattctcgcagctcaccagttttagagctagaaatagcaagttaaaataaggctagtccgttatcaacttgaaaaagtggcaccgagtcggtgcgacgagcgcggcgatatcatcatccatgggatgatcctgacgacggagaccgccgtcgtcgacaagccgtgagctgcgagaa

SEQ ID NO: 242 - DNA, 176 bp, synthetic construct
  source 1..176: mol_type = other DNA
gctattctcgcagctcaccagttttagagctagaaatagcaagttaaaataaggctagtccgttatcaacttgaaaaagtggcaccgagtcggtgcgacgagcgcggcgatatcatcatccatggatgatcctgacgacggagaccgccgtcgtcgacaagcctgagctgcgagaa

SEQ ID NO: 243 - DNA, 174 bp, synthetic construct
  source 1..174: mol_type = other DNA
gctattctcgcagctcaccagttttagagctagaaatagcaagttaaaataaggctagtccgttatcaacttgaaaaagtggcaccgagtcggtgcgacgagcgcggcgatatcatcatccatggtgatcctgacgacggagaccgccgtcgtcgacaagctgagctgcgagaa

SEQ ID NO: 244 - DNA, 182 bp, synthetic construct
  source 1..182: mol_type = other DNA
gctgtctccgccgcccgccagttttagagctagaaatagcaagttaaaataaggctagtccgttatcaacttgaaaaagtggcaccgagtcggtgcgcggcggcacgggggtcgcagtcgccatgcggatgatcctgacgacggagaccgccgtcgtcgacaagccggccgggcggcggaga

SEQ ID NO: 245 - DNA, 180 bp, synthetic construct
  source 1..180: mol_type = other DNA
gctgtctccgccgcccgccagttttagagctagaaatagcaagttaaaataaggctagtccgttatcaacttgaaaaagtggcaccgagtcggtgcgcggcggcacgggggtcgcagtcgccatgggatgatcctgacgacggagaccgccgtcgtcgacaagccggcgggcggcggaga

SEQ ID NO: 246 - DNA, 178 bp, synthetic construct
  source 1..178: mol_type = other DNA
gctgtctccgccgcccgccagttttagagctagaaatagcaagttaaaataaggctagtccgttatcaacttgaaaaagtggcaccgagtcggtgcgcggcggcacgggggtcgcagtcgccatggatgatcctgacgacggagaccgccgtcgtcgacaagccgcgggcggcggaga

SEQ ID NO: 247 - DNA, 176 bp, synthetic construct
  source 1..176: mol_type = other DNA
gctgtctccgccgcccgccagttttagagctagaaatagcaagttaaaataaggctagtccgttatcaacttgaaaaagtggcaccgagtcggtgcgcggcggcacgggggtcgcagtcgccatgatgatcctgacgacggagaccgccgtcgtcgacaagcccgggcggcggaga

SEQ ID NO: 248 - DNA, 189 bp, synthetic construct
  source 1..189: mol_type = other DNA
gcgtattgcctggaggatgggttttagagctagaaatagcaagttaaaataaggctagtccgttatcaacttgaaaaagtggcaccgagtcggtgcgaaccacgcggcgaatgccggcgtccgccccggatgatcctgacgacggagaccgccgtcgtcgacaagccggcctcctccaggcaatacgcg

SEQ ID NO: 249 - DNA, 184 bp, synthetic construct
  source 1..184: mol_type = other DNA
gcgtattgcctggaggatgggttttagagctagaaatagcaagttaaaataaggctagtccgttatcaacttgaaaaagtggcaccgagtcggtgcgaaccacgcggcgaatgccggcgtccgccccggatgatcctgacgacggagaccgccgtcgtcgacaagccggcctcctccaggcaat

SEQ ID NO: 250 - DNA, 182 bp, synthetic construct
  source 1..182: mol_type = other DNA
gcgtattgcctggaggatgggttttagagctagaaatagcaagttaaaataaggctagtccgttatcaacttgaaaaagtggcaccgagtcggtgcgaaccacgcggcgaatgccggcgtccgcccggatgatcctgacgacggagaccgccgtcgtcgacaagccggctcctccaggcaat

SEQ ID NO: 251 - DNA, 180 bp, synthetic construct
  source 1..180: mol_type = other DNA
gcgtattgcctggaggatgggttttagagctagaaatagcaagttaaaataaggctagtccgttatcaacttgaaaaagtggcaccgagtcggtgcgaaccacgcggcgaatgccggcgtccgccggatgatcctgacgacggagaccgccgtcgtcgacaagccggtcctccaggcaat

SEQ ID NO: 252 - DNA, 178 bp, synthetic construct
  source 1..178: mol_type = other DNA
gcgtattgcctggaggatgggttttagagctagaaatagcaagttaaaataaggctagtccgttatcaacttgaaaaagtggcaccgagtcggtgcgaaccacgcggcgaatgccggcgtccgccgatgatcctgacgacggagaccgccgtcgtcgacaagccgtcctccaggcaat

SEQ ID NO: 253 - DNA, 176 bp, synthetic construct
  source 1..176: mol_type = other DNA
gcgtattgcctggaggatgggttttagagctagaaatagcaagttaaaataaggctagtccgttatcaacttgaaaaagtggcaccgagtcggtgcgaaccacgcggcgaatgccggcgtccgccatgatcctgacgacggagaccgccgtcgtcgacaagcctcctccaggcaat

SEQ ID NO: 254 - DNA, 97 bp, synthetic construct
  source 1..97: mol_type = other DNA
gagccgagcacgaggggatacgttttagagctagaaatagcaagttaaaataaggctagtccgttatcaacttgaaaaagtggcaccgagtcggtgc

SEQ ID NO: 255 - DNA, 167 bp, synthetic construct
  source 1..167: mol_type = other DNA
gctattctcgcagctcaccagttttagagctagaaatagcaagttaaaataaggctagtccgttatcaacttgaaaaagtggcaccgagtcggtgcggcgatatcatcatccatggatgatcctgacgacggagaccgccgtcgtcgacaagcctgagctgcgagaa

SEQ ID NO: 256 - DNA, 162 bp, synthetic construct
  source 1..162: mol_type = other DNA
gctattctcgcagctcaccagttttagagctagaaatagcaagttaaaataaggctagtccgttatcaacttgaaaaagtggcaccgagtcggtgctatcatcatccatggatgatcctgacgacggagaccgccgtcgtcgacaagcctgagctgcgagaa

SEQ ID NO: 257 - DNA, 157 bp, synthetic construct
  source 1..157: mol_type = other DNA
gctattctcgcagctcaccagttttagagctagaaatagcaagttaaaataaggctagtccgttatcaacttgaaaaagtggcaccgagtcggtgctcatccatggatgatcctgacgacggagaccgccgtcgtcgacaagcctgagctgcgagaa

SEQ ID NO: 258 - DNA, 163 bp, synthetic construct
  source 1..163: mol_type = other DNA
gctattctcgcagctcaccagttttagagctagaaatagcaagttaaaataaggctagtccgttatcaacttgaaaaagtggcaccgagtcggtgcggcgatatcatcatccatggatgatcctgacgacggagaccgccgtcgtcgacaagcctgagctgcg

SEQ ID NO: 259 - DNA, 158 bp, synthetic construct
  source 1..158: mol_type = other DNA
gctattctcgcagctcaccagttttagagctagaaatagcaagttaaaataaggctagtccgttatcaacttgaaaaagtggcaccgagtcggtgctatcatcatccatggatgatcctgacgacggagaccgccgtcgtcgacaagcctgagctgcg

SEQ ID NO: 260 - DNA, 153 bp, synthetic construct
  source 1..153: mol_type = other DNA
gctattctcgcagctcaccagttttagagctagaaatagcaagttaaaataaggctagtccgttatcaacttgaaaaagtggcaccgagtcggtgctcatccatggatgatcctgacgacggagaccgccgtcgtcgacaagcctgagctgcg

SEQ ID NO: 261 - DNA, 167 bp, synthetic construct
  source 1..167: mol_type = other DNA
gctgtctccgccgcccgccagttttagagctagaaatagcaagttaaaataaggctagtccgttatcaacttgaaaaagtggcaccgagtcggtgccgggggtcgcagtcgccatgatgatcctgacgacggagaccgccgtcgtcgacaagcccgggcggcggaga

SEQ ID NO: 262 - DNA, 162 bp, synthetic construct
  source 1..162: mol_type = other DNA
gctgtctccgccgcccgccagttttagagctagaaatagcaagttaaaataaggctagtccgttatcaacttgaaaaagtggcaccgagtcggtgcgtcgcagtcgccatgatgatcctgacgacggagaccgccgtcgtcgacaagcccgggcggcggaga

SEQ ID NO: 263 - DNA, 157 bp, synthetic construct
  source 1..157: mol_type = other DNA
gctgtctccgccgcccgccagttttagagctagaaatagcaagttaaaataaggctagtccgttatcaacttgaaaaagtggcaccgagtcggtgcagtcgccatgatgatcctgacgacggagaccgccgtcgtcgacaagcccgggcggcggaga

SEQ ID NO: 264 - DNA, 163 bp, synthetic construct
  source 1..163: mol_type = other DNA
gctgtctccgccgcccgccagttttagagctagaaatagcaagttaaaataaggctagtccgttatcaacttgaaaaagtggcaccgagtcggtgccgggggtcgcagtcgccatgatgatcctgacgacggagaccgccgtcgtcgacaagcccgggcggcg

SEQ ID NO: 265 - DNA, 158 bp, synthetic construct
  source 1..158: mol_type = other DNA
gctgtctccgccgcccgccagttttagagctagaaatagcaagttaaaataaggctagtccgttatcaacttgaaaaagtggcaccgagtcggtgcgtcgcagtcgccatgatgatcctgacgacggagaccgccgtcgtcgacaagcccgggcggcg

SEQ ID NO: 266 - DNA, 153 bp, synthetic construct
  source 1..153: mol_type = other DNA
gctgtctccgccgcccgccagttttagagctagaaatagcaagttaaaataaggctagtccgttatcaacttgaaaaagtggcaccgagtcggtgcagtcgccatgatgatcctgacgacggagaccgccgtcgtcgacaagcccgggcggcg

SEQ ID NO: 267 - DNA, 180 bp, synthetic construct
  source 1..180: mol_type = other DNA
gagaagcggcgtccggggctagttttagagctagaaatagcaagttaaaataaggctagtccgttatcaacttgaaaaagtggcaccgagtcggtgctctttgtccagagtcacagccataccggatgatcctgacgacggagaccgccgtcgtcgacaagccggccccccggacgccgc

SEQ ID NO: 268 - DNA, 179 bp, synthetic construct
  source 1..179: mol_type = other DNA
gggcacggggccatgtacaagttttagagctagaaatagcaagttaaaataaggctagtccgttatcaacttgaaaaagtggcaccgagtcggtgcggcgtcggcagcccgatcccgttgccggatgatcctgacgacggagaccgccgtcgtcgacaagccggcctacatggccccgt

SEQ ID NO: 269 - DNA, 185 bp, synthetic construct
  source 1..185: mol_type = other DNA
gtgtcaggtggggcggggctagttttagagctagaaatagcaagttaaaataaggctagtccgttatcaacttgaaaaagtggcaccgagtcggtgcgctggctcctcccctggcaccataccggatgatcctgacgacggagaccgccgtcgtcgacaagccggccccccgccccacctgacac

SEQ ID NO: 270 - DNA, 184 bp, synthetic construct
  source 1..184: mol_type = other DNA
gagtgggtcagacgagcaggagttttagagctagaaatagcaagttaaaataaggctagtccgttatcaacttgaaaaagtggcaccgagtcggtgccgactcctcccccatgcagccctccatcccggatgatcctgacgacggagaccgccgtcgtcgacaagccggcctgctcgtctgacc

SEQ ID NO: 271 - DNA, 97 bp, synthetic construct
  source 1..97: mol_type = other DNA
gcagccacccgctctcggcccgttttagagctagaaatagcaagttaaaataaggctagtccgttatcaacttgaaaaagtggcaccgagtcggtgc

SEQ ID NO: 272 - DNA, 97 bp, synthetic construct
  source 1..97: mol_type = other DNA
gtgtagtcaggccgctcacccgttttagagctagaaatagcaagttaaaataaggctagtccgttatcaacttgaaaaagtggcaccgagtcggtgc

SEQ ID NO: 273 - DNA, 97 bp, synthetic construct
  source 1..97: mol_type = other DNA
gctgacaagtctacggaacctgttttagagctagaaatagcaagttaaaataaggctagtccgttatcaacttgaaaaagtggcaccgagtcggtgc

SEQ ID NO: 274 - DNA, 96 bp, synthetic construct
  source 1..96: mol_type = other DNA
gctcctccagcgccttgaccgttttagagctagaaatagcaagttaaaataaggctagtccgttatcaacttgaaaaagtggcaccgagtcggtgc

SEQ ID NO: 275 - DNA, 96 bp, synthetic construct
  source 1..96: mol_type = other DNA
gctattctcgcagctcaccagttttagagctagaaatagcaagttaaaataaggctagtccgttatcaacttgaaaaagtggcaccgagtcggtgc

SEQ ID NO: 276 - DNA, 96 bp, synthetic construct
  source 1..96: mol_type = other DNA
agaagcggcgtccggggctagttttagagctagaaatagcaagttaaaataaggctagtccgttatcaacttgaaaaagtggcaccgagtcggtgc

SEQ ID NO: 277 - DNA, 96 bp, synthetic construct
  source 1..96: mol_type = other DNA
gggcacggggccatgtacaagttttagagctagaaatagcaagttaaaataaggctagtccgttatcaacttgaaaaagtggcaccgagtcggtgc

SEQ ID NO: 278 - DNA, 96 bp, synthetic construct
  source 1..96: mol_type = other DNA
gcgtattgcctggaggatgggttttagagctagaaatagcaagttaaaataaggctagtccgttatcaacttgaaaaagtggcaccgagtcggtgc

SEQ ID NO: 279 - DNA, 96 bp, synthetic construct
  source 1..96: mol_type = other DNA
tgtcaggtggggcggggctagttttagagctagaaatagcaagttaaaataaggctagtccgttatcaacttgaaaaagtggcaccgagtcggtgc

SEQ ID NO: 280 - DNA, 96 bp, synthetic construct
  source 1..96: mol_type = other DNA
agtgggtcagacgagcaggagttttagagctagaaatagcaagttaaaataaggctagtccgttatcaacttgaaaaagtggcaccgagtcggtgc

SEQ ID NO: 281 - DNA, 96 bp, synthetic construct
  source 1..96: mol_type = other DNA
gctgtctccgccgcccgccagttttagagctagaaatagcaagttaaaataaggctagtccgttatcaacttgaaaaagtggcaccgagtcggtgc

SEQ ID NO: 282 - DNA, 96 bp, synthetic construct
  source 1..96: mol_type = other DNA
ggggtcgcagtcgccatggcgttttagagctagaaatagcaagttaaaataaggctagtccgttatcaacttgaaaaagtggcaccgagtcggtgc

SEQ ID NO: 283 - DNA, 184 bp, synthetic construct
  source 1..184: mol_type = other DNA
gctattctcgcagctcaccagttttagagctagaaatagcaagttaaaataaggctagtccgttatcaacttgaaaaagtggcaccgagtcggtgcgacgagcgcggcgatatcatcatccatggccggatgatcctgacgacggagnncgccgtcgtcgacaagccggcctgagctgcgagaa

SEQ ID NO: 284 - DNA, 183 bp, synthetic construct
  source 1..183: mol_type = other DNA
gctattctcgcagctcaccagttttagagctagaaatagcaagttaaaataaggctagtccgttatcaacttgaaaaagtggcaccgagtcggtgcgacgagcgcggcgatatcatcatccatgccggatgatcctgacgacggagaccgccgtcgtcgacaagccggcctgagctgcgagaa

SEQ ID NO: 285 - DNA, 183 bp, synthetic construct
  source 1..183: mol_type = other DNA
gctattctcgcagctcaccagttttagagctagaaatagcaagttaaaataaggctagtccgttatcaacttgaaaaagtggcaccgagtcggtgcgacgagcgcggcgatatcatcatccatgccggatgatcctgacgacggagagcgccgtcgtcgacaagccggcctgagctgcgagaa

SEQ ID NO: 286 - DNA, 189 bp, synthetic construct
  source 1..189: mol_type = other DNA
gcgtattgcctggaggatgggttttagagctagaaatagcaagttaaaataaggctagtccgttatcaacttgaaaaagtggcaccgagtcggtgcgaaccacgcggcgaatgccggcgtccgccccggatgatcctgacgacggagtccgccgtcgtcgacaagccggcctcctccaggcaatacgcg

SEQ ID NO: 287 - DNA, 189 bp, synthetic construct
  source 1..189: mol_type = other DNA
gctgtctccgccgcccgccagttttagagctagaaatagcaagttaaaataaggctagtccgttatcaacttgaaaaagtggcaccgagtcggtgcgcggcggcacgggggtcgcagtcgccatgccggatgatcctgacgacggagctcgccgtcgtcgacaagccggcccgggcggcggagacagcg

SEQ ID NO: 288 - DNA, 96 bp, synthetic construct
  source 1..96: mol_type = other DNA
gtcacctccaatgactaggggttttagagctagaaatagcaagttaaaataaggctagtccgttatcaacttgaaaaagtggcaccgagtcggtgc

SEQ ID NO: 289 - DNA, 96 bp, synthetic construct
  source 1..96: mol_type = other DNA
gggcaaccacaaacccacgagttttagagctagaaatagcaagttaaaataaggctagtccgttatcaacttgaaaaagtggcaccgagtcggtgc

SEQ ID NO: 290 - DNA, 194 bp, synthetic construct
  source 1..194: mol_type = other DNA
gctattctcgcagctcaccagttttagagctagaaatagcaagttaaaataaggctagtccgttatcaacttgaaaaagtggcaccgagtcggtgcgacgagcgcggcgatatcatcatccatggctatgccggatgatcctgacgacggagtccgccgtcgtcgacaagccggccctagctgagctgcgagaa

SEQ ID NO: 291 - DNA, 189 bp, synthetic construct
  source 1..189: mol_type = other DNA
gctattctcgcagctcaccagttttagagctagaaatagcaagttaaaataaggctagtccgttatcaacttgaaaaagtggcaccgagtcggtgcgacgagcgcggcgatatcatcatccatggtgccggatgatcctgacgacggagtccgccgtcgtcgacaagccggccctatgagctgcgagaa

SEQ ID NO: 292 - DNA, 184 bp, synthetic construct
  source 1..184: mol_type = other DNA
gctattctcgcagctcaccagttttagagctagaaatagcaagttaaaataaggctagtccgttatcaacttgaaaaagtggcaccgagtcggtgcgacgagcgcggcgatatcatcatccatggccggatgatcctgacgacggagtccgccgtcgtcgacaagccggcctgagctgcgagaa

SEQ ID NO: 293 - DNA, 179 bp, synthetic construct
  source 1..179: mol_type = other DNA
gctattctcgcagctcaccagttttagagctagaaatagcaagttaaaataaggctagtccgttatcaacttgaaaaagtggcaccgagtcggtgcgacgagcgcggcgatatcatcatccatggggatgatcctgacgacggagtccgccgtcgtcgacaagccgtgagctgcgagaa

SEQ ID NO: 294 - DNA, 174 bp, synthetic construct
  source 1..174: mol_type = other DNA
gctattctcgcagctcaccagttttagagctagaaatagcaagttaaaataaggctagtccgttatcaacttgaaaaagtggcaccgagtcggtgcgacgagcgcggcgatatcatcatccatggtgatcctgacgacggagtccgccgtcgtcgacaagctgagctgcgagaa

SEQ ID NO: 295 - DNA, 169 bp, synthetic construct
  source 1..169: mol_type = other DNA
gctattctcgcagctcaccagttttagagctagaaatagcaagttaaaataaggctagtccgttatcaacttgaaaaagtggcaccgagtcggtgcgacgagcgcggcgatatcatcatccatggatcctgacgacggagtccgccgtcgtcgacatgagctgcgagaa

SEQ ID NO: 296 - DNA, 164 bp, synthetic construct
  source 1..164: mol_type = other DNA
gctattctcgcagctcaccagttttagagctagaaatagcaagttaaaataaggctagtccgttatcaacttgaaaaagtggcaccgagtcggtgcgacgagcgcggcgatatcatcatccatggcctgacgacggagtccgccgtcgtcgtgagctgcgagaa

SEQ ID NO: 297 - DNA, 159 bp, synthetic construct
  source 1..159: mol_type = other DNA
gctattctcgcagctcaccagttttagagctagaaatagcaagttaaaataaggctagtccgttatcaacttgaaaaagtggcaccgagtcggtgcgacgagcgcggcgatatcatcatccatggtgacgacggagtccgccgtcgtgagctgcgagaa

SEQ ID NO: 298 - DNA, 154 bp, synthetic construct
  source 1..154: mol_type = other DNA
gctattctcgcagctcaccagttttagagctagaaatagcaagttaaaataaggctagtccgttatcaacttgaaaaagtggcaccgagtcggtgcgacgagcgcggcgatatcatcatccatggacgacggagtccgccgtgagctgcgagaa

SEQ ID NO: 299 - DNA, 149 bp, synthetic construct
  source 1..149: mol_type = other DNA
gctattctcgcagctcaccagttttagagctagaaatagcaagttaaaataaggctagtccgttatcaacttgaaaaagtggcaccgagtcggtgcgacgagcgcggcgatatcatcatccatgggacggagtccgtgagctgcgagaa

SEQ ID NO: 300 - DNA, 144 bp, synthetic construct
  source 1..144: mol_type = other DNA
gctattctcgcagctcaccagttttagagctagaaatagcaagttaaaataaggctagtccgttatcaacttgaaaaagtggcaccgagtcggtgcgacgagcgcggcgatatcatcatccatggcggagttgagctgcgagaa

SEQ ID NO: 301 - DNA, 182 bp, synthetic construct
  source 1..182: mol_type = other DNA
gaagccggccttgcacatgcgttttagagctagaaatagcaagttaaaataaggctagtccgttatcaacttgaaaaagtggcaccgagtcggtgctcgacgacgagcgcggcgatatcatcatccatggtaccgttcgtatagcatacattatacgaagttattgagctgcgagaatagcc

SEQ ID NO: 302 - DNA, 177 bp, synthetic construct
  source 1..177: mol_type = other DNA
gaagccggccttgcacatgcgttttagagctagaaatagcaagttaaaataaggctagtccgttatcaacttgaaaaagtggcaccgagtcggtgcgacgagcgcggcgatatcatcatccatggtaccgttcgtatagcatacattatacgaagttattgagctgcgagaatagcc

SEQ ID NO: 303 - DNA, 177 bp, synthetic construct
  source 1..177: mol_type = other DNA
gaagccggccttgcacatgcgttttagagctagaaatagcaagttaaaataaggctagtccgttatcaacttgaaaaagtggcaccgagtcggtgctcgacgacgagcgcggcgatatcatcatccatggtaccgttcgtatagcatacattatacgaagttattgagctgcgagaa

SEQ ID NO: 304 - DNA, 159 bp, synthetic construct
  source 1..159: mol_type = other DNA
gaagccggccttgcacatgcgttttagagctagaaatagcaagttaaaataaggctagtccgttatcaacttgaaaaagtggcaccgagtcggtgcatatcatcatccatggtaccgttcgtatagcatacattatacgaagttattgagctgcgagaa

SEQ ID NO: 305 - DNA, 96 bp, synthetic construct
  source 1..96: mol_type = other DNA
ccccacgatggaggggaagagttttagagctagaaatagcaagttaaaataaggctagtccgttatcaacttgaaaaagtggcaccgagtcggtgc

SEQ ID NO: 306 - DNA, 96 bp, synthetic construct
  source 1..96: mol_type = other DNA
ccttctcctggagccgcgacgttttagagctagaaatagcaagttaaaataaggctagtccgttatcaacttgaaaaagtggcaccgagtcggtgc

SEQ ID NO: 307 - DNA, 188 bp, synthetic construct
  source 1..188: mol_type = other DNA
gctattctcgcagctcaccagttttagagctagaaatagcaagttaaaataaggctagtccgttatcaacttgaaaaagtggcaccgagtcggtgcgacgagcgcggcgatatcatcatccatggcattatatgttcttacagtatggcggcccggattgtaaaaacatataatgtgagctgcgagaa

SEQ ID NO: 308 - DNA, 188 bp, synthetic construct
  source 1..188: mol_type = other DNA
gctattctcgcagctcaccagttttagagctagaaatagcaagttaaaataaggctagtccgttatcaacttgaaaaagtggcaccgagtcggtgcgacgagcgcggcgatatcatcatccatggcgttatagggtattacagtatggcggtcggtactgcaataccctataacgtgagctgcgagaa

SEQ ID NO: 309 - DNA, 188 bp, synthetic construct
  source 1..188: mol_type = other DNA
gctattctcgcagctcaccagttttagagctagaaatagcaagttaaaataaggctagtccgttatcaacttgaaaaagtggcaccgagtcggtgcgacgagcgcggcgatatcatcatccatggtgtatcattttcatatagttagcacctgcacactatatgaaaatgatacatgagctgcgagaa

SEQ ID NO: 310 - DNA, 188 bp, synthetic construct
  source 1..188: mol_type = other DNA
gctattctcgcagctcaccagttttagagctagaaatagcaagttaaaataaggctagtccgttatcaacttgaaaaagtggcaccgagtcggtgcgacgagcgcggcgatatcatcatccatggtgtctactatctgtatatgcgacacatgtggcataaagacatagtagacatgagctgcgagaa

SEQ ID NO: 311 - DNA, 188 bp, synthetic construct
  source 1..188: mol_type = other DNA
gctattctcgcagctcaccagttttagagctagaaatagcaagttaaaataaggctagtccgttatcaacttgaaaaagtggcaccgagtcggtgcgacgagcgcggcgatatcatcatccatggcatcgaccctgacgcatgcggaggcggcgctccatgcgtctgacctcatttgagctgcgagaa

SEQ ID NO: 312 - DNA, 188 bp, synthetic construct
  source 1..188: mol_type = other DNA
gctattctcgcagctcaccagttttagagctagaaatagcaagttaaaataaggctagtccgttatcaacttgaaaaagtggcaccgagtcggtgcgacgagcgcggcgatatcatcatccatgggttagtacccaaatgacaaaaggtcatccttttatcatttgggtactaactgagctgcgagaa

SEQ ID NO: 313 - DNA, 188 bp, synthetic construct
  source 1..188: mol_type = other DNA
gctattctcgcagctcaccagttttagagctagaaatagcaagttaaaataaggctagtccgttatcaacttgaaaaagtggcaccgagtcggtgcgacgagcgcggcgatatcatcatccatggcttattaaaacccgttccgcttctgtcaaagcggcatcggttttataaactgagctgcgagaa

SEQ ID NO: 314 - DNA, 188 bp, synthetic construct
  source 1..188: mol_type = other DNA
gctattctcgcagctcaccagttttagagctagaaatagcaagttaaaataaggctagtccgttatcaacttgaaaaagtggcaccgagtcggtgcgacgagcgcggcgatatcatcatccatggggcgtgatggtcgtgaacctcaacatgacgacgaacacgacctcgcggcctgagctgcgagaa

SEQ ID NO: 315 - DNA, 188 bp, synthetic construct
  source 1..188: mol_type = other DNA
gctattctcgcagctcaccagttttagagctagaaatagcaagttaaaataaggctagtccgttatcaacttgaaaaagtggcaccgagtcggtgcgacgagcgcggcgatatcatcatccatggtctacatcttgaatatatcaagttataactttgaattatatcagtttatatgagctgcgagaa

SEQ ID NO: 316 - DNA, 188 bp, synthetic construct
  source 1..188: mol_type = other DNA
gctattctcgcagctcaccagttttagagctagaaatagcaagttaaaataaggctagtccgttatcaacttgaaaaagtggcaccgagtcggtgcgacgagcgcggcgatatcatcatccatggaattatatctaaaagcactaagctccgccatactgcttttagatataatatgagctgcgagaa

SEQ ID NO: 317 - DNA, 176 bp, synthetic construct
  source 1..176: mol_type = other DNA
gctattctcgcagctcaccagttttagagctagaaatagcaagttaaaataaggctagtccgttatcaacttgaaaaagtggcaccgagtcggtgcgacgagcgcggcgatatcatcatccatgggatatggggaagtgaatcagtacaaccgccacagtacctgagctgcgagaa

SEQ ID NO: 318 - DNA, 176 bp, synthetic construct
  source 1..176: mol_type = other DNA
gctattctcgcagctcaccagttttagagctagaaatagcaagttaaaataaggctagtccgttatcaacttgaaaaagtggcaccgagtcggtgcgacgagcgcggcgatatcatcatccatggggtactgtggcggttgtactgattcacttccccatatctgagctgcgagaa

SEQ ID NO: 319 - DNA, 176 bp, synthetic construct
  source 1..176: mol_type = other DNA
gctattctcgcagctcaccagttttagagctagaaatagcaagttaaaataaggctagtccgttatcaacttgaaaaagtggcaccgagtcggtgcgacgagcgcggcgatatcatcatccatggtgggtggtacaggtgccacattagttgtaccatttatgtgagctgcgagaa

SEQ ID NO: 320 - DNA, 176 bp, synthetic construct
  source 1..176: mol_type = other DNA
gctattctcgcagctcaccagttttagagctagaaatagcaagttaaaataaggctagtccgttatcaacttgaaaaagtggcaccgagtcggtgcgacgagcgcggcgatatcatcatccatggcataaatggtacaactaatgtggcacctgtaccacccatgagctgcgagaa

SEQ ID NO: 321 - DNA, 176 bp, synthetic construct
  source 1..176: mol_type = other DNA
gctattctcgcagctcaccagttttagagctagaaatagcaagttaaaataaggctagtccgttatcaacttgaaaaagtggcaccgagtcggtgcgacgagcgcggcgatatcatcatccatgggttgtttttccagatccagttggtcctgtaaatataagtgagctgcgagaa

SEQ ID NO: 322 - DNA, 176 bp, synthetic construct
  source 1..176: mol_type = other DNA
gctattctcgcagctcaccagttttagagctagaaatagcaagttaaaataaggctagtccgttatcaacttgaaaaagtggcaccgagtcggtgcgacgagcgcggcgatatcatcatccatggcttatatttacaggaccaactggatctggaaaaacaactgagctgcgagaa

SEQ ID NO: 323 - DNA, 174 bp, synthetic construct
  source 1..174: mol_type = other DNA
gctattctcgcagctcaccagttttagagctagaaatagcaagttaaaataaggctagtccgttatcaacttgaaaaagtggcaccgagtcggtgcgacgagcgcggcgatatcatcatccatgggtactgtggcggttgtactgattcacttccccatattgagctgcgagaa

SEQ ID NO: 324 - DNA, 172 bp, synthetic construct
  source 1..172: mol_type = other DNA
gctattctcgcagctcaccagttttagagctagaaatagcaagttaaaataaggctagtccgttatcaacttgaaaaagtggcaccgagtcggtgcgacgagcgcggcgatatcatcatccatggtactgtggcggttgtactgattcacttccccatatgagctgcgagaa

SEQ ID NO: 325 - DNA, 170 bp, synthetic construct
  source 1..170: mol_type = other DNA
gctattctcgcagctcaccagttttagagctagaaatagcaagttaaaataaggctagtccgttatcaacttgaaaaagtggcaccgagtcggtgcgacgagcgcggcgatatcatcatccatggactgtggcggttgtactgattcacttccccattgagctgcgagaa

SEQ ID NO: 326 - DNA, 174 bp, synthetic construct
  source 1..174: mol_type = other DNA
gctattctcgcagctcaccagttttagagctagaaatagcaagttaaaataaggctagtccgttatcaacttgaaaaagtggcaccgagtcggtgcgacgagcgcggcgatatcatcatccatggatatggggaagtgaatcagtacaaccgccacagtactgagctgcgagaa

SEQ ID NO: 327 - DNA, 172 bp, synthetic construct
  source 1..172: mol_type = other DNA
gctattctcgcagctcaccagttttagagctagaaatagcaagttaaaataaggctagtccgttatcaacttgaaaaagtggcaccgagtcggtgcgacgagcgcggcgatatcatcatccatggtatggggaagtgaatcagtacaaccgccacagtatgagctgcgagaa

SEQ ID NO: 328 - DNA, 170 bp, synthetic construct
  source 1..170: mol_type = other DNA
gctattctcgcagctcaccagttttagagctagaaatagcaagttaaaataaggctagtccgttatcaacttgaaaaagtggcaccgagtcggtgcgacgagcgcggcgatatcatcatccatggatggggaagtgaatcagtacaaccgccacagttgagctgcgagaa

SEQ ID NO: 329 - DNA, 174 bp, synthetic construct
  source 1..174: mol_type = other DNA
gctattctcgcagctcaccagttttagagctagaaatagcaagttaaaataaggctagtccgttatcaacttgaaaaagtggcaccgagtcggtgcgacgagcgcggcgatatcatcatccatggataaatggtacaactaatgtggcacctgtaccaccctgagctgcgagaa

SEQ ID NO: 330 - DNA, 172 bp, synthetic construct
  source 1..172: mol_type = other DNA
gctattctcgcagctcaccagttttagagctagaaatagcaagttaaaataaggctagtccgttatcaacttgaaaaagtggcaccgagtcggtgcgacgagcgcggcgatatcatcatccatggtaaatggtacaactaatgtggcacctgtaccacctgagctgcgagaa

SEQ ID NO: 331 - DNA, 170 bp, synthetic construct
  source 1..170: mol_type = other DNA
gctattctcgcagctcaccagttttagagctagaaatagcaagttaaaataaggctagtccgttatcaacttgaaaaagtggcaccgagtcggtgcgacgagcgcggcgatatcatcatccatggaaatggtacaactaatgtggcacctgtaccactgagctgcgagaa

SEQ ID NO: 332 - DNA, 174 bp, synthetic construct
  source 1..174: mol_type = other DNA
gctattctcgcagctcaccagttttagagctagaaatagcaagttaaaataaggctagtccgttatcaacttgaaaaagtggcaccgagtcggtgcgacgagcgcggcgatatcatcatccatgggggtggtacaggtgccacattagttgtaccatttattgagctgcgagaa

SEQ ID NO: 333 - DNA, 172 bp, synthetic construct
  source 1..172: mol_type = other DNA
gctattctcgcagctcaccagttttagagctagaaatagcaagttaaaataaggctagtccgttatcaacttgaaaaagtggcaccgagtcggtgcgacgagcgcggcgatatcatcatccatggggtggtacaggtgccacattagttgtaccatttatgagctgcgagaa

SEQ ID NO: 334 - DNA, 170 bp, synthetic construct
  source 1..170: mol_type = other DNA
gctattctcgcagctcaccagttttagagctagaaatagcaagttaaaataaggctagtccgttatcaacttgaaaaagtggcaccgagtcggtgcgacgagcgcggcgatatcatcatccatgggtggtacaggtgccacattagttgtaccattttgagctgcgagaa

SEQ ID NO: 335 - DNA, 174 bp, synthetic construct
  source 1..174: mol_type = other DNA
gctattctcgcagctcaccagttttagagctagaaatagcaagttaaaataaggctagtccgttatcaacttgaaaaagtggcaccgagtcggtgcgacgagcgcggcgatatcatcatccatggttatatttacaggaccaactggatctggaaaaacaatgagctgcgagaa

SEQ ID NO: 336 - DNA, 172 bp, synthetic construct
  source 1..172: mol_type = other DNA
gctattctcgcagctcaccagttttagagctagaaatagcaagttaaaataaggctagtccgttatcaacttgaaaaagtggcaccgagtcggtgcgacgagcgcggcgatatcatcatccatggtatatttacaggaccaactggatctggaaaaacatgagctgcgagaa

SEQ ID NO: 337 - DNA, 170 bp, synthetic construct
  source 1..170: mol_type = other DNA
gctattctcgcagctcaccagttttagagctagaaatagcaagttaaaataaggctagtccgttatcaacttgaaaaagtggcaccgagtcggtgcgacgagcgcggcgatatcatcatccatggatatttacaggaccaactggatctggaaaaactgagctgcgagaa

SEQ ID NO: 338 - DNA, 174 bp, synthetic construct
  source 1..174: mol_type = other DNA
gctattctcgcagctcaccagttttagagctagaaatagcaagttaaaataaggctagtccgttatcaacttgaaaaagtggcaccgagtcggtgcgacgagcgcggcgatatcatcatccatggttgtttttccagatccagttggtcctgtaaatataatgagctgcgagaa

SEQ ID NO: 339 - DNA, 172 bp, synthetic construct
  source 1..172: mol_type = other DNA
gctattctcgcagctcaccagttttagagctagaaatagcaagttaaaataaggctagtccgttatcaacttgaaaaagtggcaccgagtcggtgcgacgagcgcggcgatatcatcatccatggtgtttttccagatccagttggtcctgtaaatatatgagctgcgagaa

SEQ ID NO: 340 - DNA, 170 bp, synthetic construct
  source 1..170: mol_type = other DNA
gctattctcgcagctcaccagttttagagctagaaatagcaagttaaaataaggctagtccgttatcaacttgaaaaagtggcaccgagtcggtgcgacgagcgcggcgatatcatcatccatgggtttttccagatccagttggtcctgtaaatattgagctgcgagaa

SEQ ID NO: 341 - DNA, 151 bp, synthetic construct
  source 1..151: mol_type = other DNA
gctgtctccgccgcccgccagttttagagctagaaatagcaagttaaaataaggctagtccgttatcaacttgaaaaagtggcaccgagtcggtgcagtcgccatgatatggggaagtgaatcagtacaaccgccacagtaccgggcggcg

SEQ ID NO: 342 - DNA, 179 bp, synthetic construct
  source 1..179: mol_type = other DNA
gcgtattgcctggaggatgggttttagagctagaaatagcaagttaaaataaggctagtccgttatcaacttgaaaaagtggcaccgagtcggtgcgaaccacgcggcgaatgccggcgtccgccatatggggaagtgaatcagtacaaccgccacagtactcctccaggcaatacgcg

SEQ ID NO: 343 - DNA, 170 bp, synthetic construct
  source 1..170: mol_type = other DNA
gagaagcggcgtccggggctagttttagagctagaaatagcaagttaaaataaggctagtccgttatcaacttgaaaaagtggcaccgagtcggtgctctttgtccagagtcacagccataatatggggaagtgaatcagtacaaccgccacagtacccccggacgccgc

SEQ ID NO: 344 - DNA, 169 bp, synthetic construct
  source 1..169: mol_type = other DNA
gggcacggggccatgtacaagttttagagctagaaatagcaagttaaaataaggctagtccgttatcaacttgaaaaagtggcaccgagtcggtgcggcgtcggcagcccgatcccgttgatatggggaagtgaatcagtacaaccgccacagtactacatggccccgt

SEQ ID NO: 345 - DNA, 175 bp, synthetic construct
  source 1..175: mol_type = other DNA
gtgtcaggtggggcggggctagttttagagctagaaatagcaagttaaaataaggctagtccgttatcaacttgaaaaagtggcaccgagtcggtgcgctggctcctcccctggcaccataatatggggaagtgaatcagtacaaccgccacagtacccccgccccacctgacac

SEQ ID NO: 346 - DNA, 174 bp, synthetic construct
  source 1..174: mol_type = other DNA
gagtgggtcagacgagcaggagttttagagctagaaatagcaagttaaaataaggctagtccgttatcaacttgaaaaagtggcaccgagtcggtgccgactcctcccccatgcagccctccatcatatggggaagtgaatcagtacaaccgccacagtactgctcgtctgacc

SEQ ID NO: 347 - DNA, 161 bp, synthetic construct
  source 1..161: mol_type = other DNA
gctgtctccgccgcccgccagttttagagctagaaatagcaagttaaaataaggctagtccgttatcaacttgaaaaagtggcaccgagtcggtgccgggggtcgcagtcgccatgatatggggaagtgaatcagtacaaccgccacagtaccgggcggcg

SEQ ID NO: 348 - DNA, 165 bp, synthetic construct
  source 1..165: mol_type = other DNA
gggcacggggccatgtacaagttttagagctagaaatagcaagttaaaataaggctagtccgttatcaacttgaaaaagtggcaccgagtcggtgccgggggtcgcagtcgccatgatatggggaagtgaatcagtacaaccgccacagtaccgggcggcggaga

SEQ ID NO: 349 - DNA, 174 bp, synthetic construct
  source 1..174: mol_type = other DNA
gggcacggggccatgtacaagttttagagctagaaatagcaagttaaaataaggctagtccgttatcaacttgaaaaagtggcaccgagtcggtgcgcggcggcacgggggtcgcagtcgccatgatatggggaagtgaatcagtacaaccgccacagtaccgggcggcggaga

SEQ ID NO: 350 - DNA, 174 bp, synthetic construct
  source 1..174: mol_type = other DNA
gcgtattgcctggaggatgggttttagagctagaaatagcaagttaaaataaggctagtccgttatcaacttgaaaaagtggcaccgagtcggtgcgaaccacgcggcgaatgccggcgtccgccatatggggaagtgaatcagtacaaccgccacagtactcctccaggcaat

SEQ ID NO: 351 - DNA, 165 bp, synthetic construct
  source 1..165: mol_type = other DNA
gggcacggggccatgtacaagttttagagctagaaatagcaagttaaaataaggctagtccgttatcaacttgaaaaagtggcaccgagtcggtgcggcgaatgccggcgtccgccatatggggaagtgaatcagtacaaccgccacagtactcctccaggcaat

SEQ ID NO: 352 - DNA, 170 bp, synthetic construct
  source 1..170: mol_type = other DNA
gggcacggggccatgtacaagttttagagctagaaatagcaagttaaaataaggctagtccgttatcaacttgaaaaagtggcaccgagtcggtgcggcgaatgccggcgtccgccatatggggaagtgaatcagtacaaccgccacagtactcctccaggcaatacgcg

SEQ ID NO: 353 - DNA, 165 bp, synthetic construct
  source 1..165: mol_type = other DNA
gggcacggggccatgtacaagttttagagctagaaatagcaagttaaaataaggctagtccgttatcaacttgaaaaagtggcaccgagtcggtgcggcgtcggcagcccgatcccgttgatatggggaagtgaatcagtacaaccgccacagtactacatggcc

SEQ ID NO: 354 - DNA, 151 bp, synthetic construct
  source 1..151: mol_type = other DNA
gggcacggggccatgtacaagttttagagctagaaatagcaagttaaaataaggctagtccgttatcaacttgaaaaagtggcaccgagtcggtgcgatcccgttgatatggggaagtgaatcagtacaaccgccacagtactacatggcc

SEQ ID NO: 355 - DNA, 155 bp, synthetic construct
  source 1..155: mol_type = other DNA
gggcacggggccatgtacaagttttagagctagaaatagcaagttaaaataaggctagtccgttatcaacttgaaaaagtggcaccgagtcggtgcgatcccgttgatatggggaagtgaatcagtacaaccgccacagtactacatggccccgt

SEQ ID NO: 356 - DNA, 169 bp, synthetic construct
  source 1..169: mol_type = other DNA
gctattctcgcagctcaccagttttagagctagaaatagcaagttaaaataaggctagtccgttatcaacttgaaaaagtggcaccgagtcggtgcgcgcggcgatatcatcatccatggatgatcctgacgacggagaccgccgtcgtcgacaagcctgagctgcgag

SEQ ID NO: 357 - DNA, 174 bp, synthetic construct
  source 1..174: mol_type = other DNA
gctattctcgcagctcaccagttttagagctagaaatagcaagttaaaataaggctagtccgttatcaacttgaaaaagtggcaccgagtcggtgccgatatcatcatccatggcggatgatcctgacgacggagaccgccgtcgtcgacaagccggctgagctgcgagaatag

SEQ ID NO: 358 - DNA, 168 bp, synthetic construct
  source 1..168: mol_type = other DNA
gctgtctccgccgcccgccagttttagagctagaaatagcaagttaaaataaggctagtccgttatcaacttgaaaaagtggcaccgagtcggtgcgcggcacgggggtcgcagtcgccatgatgatcctgacgacggagaccgccgtcgtcgacaagcccgggcggc

SEQ ID NO: 359 - DNA, 171 bp, synthetic construct
  source 1..171: mol_type = other DNA
gcgtattgcctggaggatgggttttagagctagaaatagcaagttaaaataaggctagtccgttatcaacttgaaaaagtggcaccgagtcggtgcaatgccggcgtccgcccggatgatcctgacgacggagaccgccgtcgtcgacaagccggctcctccaggcaatac

SEQ ID NO: 360 - DNA, 158 bp, synthetic construct
  source 1..158: mol_type = other DNA
gcgtattgcctggaggatgggttttagagctagaaatagcaagttaaaataaggctagtccgttatcaacttgaaaaagtggcaccgagtcggtgcggcgtccgccatgatcctgacgacggagaccgccgtcgtcgacaagcctcctccaggcaata

SEQ ID NO: 361 - DNA, 179 bp, synthetic construct
  source 1..179: mol_type = other DNA
gggaaatgcatcttgcacaagttttagagctagaaatagcaagttaaaataaggctagtccgttatcaacttgaaaaagtggcaccgagtcggtgcagcccctccatgctctctagctgttgccattgggcttgtcgacgacggcggtctccgtcgtcaggatcattgcaagatgcatt

SEQ ID NO: 362 - DNA, 153 bp, synthetic construct
  source 1..153: mol_type = other DNA
gtgtcaggtggggcggggctagttttagagctagaaatagcaagttaaaataaggctagtccgttatcaacttgaaaaagtggcaccgagtcggtgctggcaccataatgatcctgacgacggagaccgccgtcgtcgacaagccccccgccc

SEQ ID NO: 363 - DNA, 96 bp, synthetic construct
  source 1..96: mol_type = other DNA
gtggggacagccccgtctctgttttagagctagaaatagcaagttaaaataaggctagtccgttatcaacttgaaaaagtggcaccgagtcggtgc

SEQ ID NO: 364 - DNA, 97 bp, synthetic construct
  source 1..97: mol_type = other DNA
gctcttgggaaaaaaaccctagttttagagctagaaatagcaagttaaaataaggctagtccgttatcaacttgaaaaagtggcaccgagtcggtgc

SEQ ID NO: 365 - DNA, 97 bp, synthetic construct
  source 1..97: mol_type = other DNA
gtcttgggaaaaaaaccctaagttttagagctagaaatagcaagttaaaataaggctagtccgttatcaacttgaaaaagtggcaccgagtcggtgc

SEQ ID NO: 366 - DNA, 96 bp, synthetic construct
  source 1..96: mol_type = other DNA
gaaaaaaaccctaagggctggttttagagctagaaatagcaagttaaaataaggctagtccgttatcaacttgaaaaagtggcaccgagtcggtgc

SEQ ID NO: 367 - DNA, 97 bp, synthetic construct
  source 1..97: mol_type = other DNA
gctgaggatccttgtgagtgtgttttagagctagaaatagcaagttaaaataaggctagtccgttatcaacttgaaaaagtggcaccgagtcggtgc

SEQ ID NO: 368 - DNA, 97 bp, synthetic construct
  source 1..97: mol_type = other DNA
gtgaggatccttgtgagtgttgttttagagctagaaatagcaagttaaaataaggctagtccgttatcaacttgaaaaagtggcaccgagtcggtgc

SEQ ID NO: 369 - DNA, 96 bp, synthetic construct
  source 1..96: mol_type = other DNA
ggatccttgtgagtgttggggttttagagctagaaatagcaagttaaaataaggctagtccgttatcaacttgaaaaagtggcaccgagtcggtgc

SEQ ID NO: 370 - DNA, 96 bp, synthetic construct
  source 1..96: mol_type = other DNA
gatccttgtgagtgttgggtgttttagagctagaaatagcaagttaaaataaggctagtccgttatcaacttgaaaaagtggcaccgagtcggtgc

SEQ ID NO: 371 - DNA, 96 bp, synthetic construct
  source 1..96: mol_type = other DNA
gttgggtgggaacagctcccgttttagagctagaaatagcaagttaaaataaggctagtccgttatcaacttgaaaaagtggcaccgagtcggtgc

SEQ ID NO: 372 - DNA, 96 bp, synthetic construct
  source 1..96: mol_type = other DNA
gggtgggaacagctcccagggttttagagctagaaatagcaagttaaaataaggctagtccgttatcaacttgaaaaagtggcaccgagtcggtgc

SEQ ID NO: 373 - DNA, 97 bp, synthetic construct
  source 1..97: mol_type = other DNA
gcttctgtgcagcagtttcccgttttagagctagaaatagcaagttaaaataaggctagtccgttatcaacttgaaaaagtggcaccgagtcggtgc

SEQ ID NO: 374 - DNA, 97 bp, synthetic construct
  source 1..97: mol_type = other DNA
gtttccctggccactaaataggttttagagctagaaatagcaagttaaaataaggctagtccgttatcaacttgaaaaagtggcaccgagtcggtgc

SEQ ID NO: 375 - DNA, 97 bp, synthetic construct
  source 1..97: mol_type = other DNA
gttccctggccactaaatagtgttttagagctagaaatagcaagttaaaataaggctagtccgttatcaacttgaaaaagtggcaccgagtcggtgc

SEQ ID NO: 376 - DNA, 96 bp, synthetic construct
  source 1..96: mol_type = other DNA
gattagatagaagccctccagttttagagctagaaatagcaagttaaaataaggctagtccgttatcaacttgaaaaagtggcaccgagtcggtgc

SEQ ID NO: 377 - DNA, 97 bp, synthetic construct
  source 1..97: mol_type = other DNA
gattagatagaagccctccaagttttagagctagaaatagcaagttaaaataaggctagtccgttatcaacttgaaaaagtggcaccgagtcggtgc

SEQ ID NO: 378 - protein, 527 aa, Homo sapiens
MEKNRAVLYLRLSKEDVDKVNKGDDSSSIKSQRLLLTDFALERGFKIVGVYSDDDESGLYDDRPDFERMMTDAKLDEFDIIIAKTQSRFSRNMEHIEKYLHHDLPNLGIRFIGAVDGVDTESDENKKSRQINGLVNEWYCEDLSKNIRSAFKAKMKDGQFLGSSCPYGYKKDPQNHNHLVVDDYAAKVVQKIFNLYLEGYGKAKIGSILSSEGILIPTLYKKDILKQNYHNSKALDTTQNWSYQTIHTILNNEVYLGHLIQNKVNTMSYKDKNKRILPKEKWIIVRNTHEPIITEEMFQDVQKLQKNRTRSVENIEPNGLFSGLIFCADCKHAMSRKYARRGEKGFVGYVCKTYKTQGKNFCESHSIDYDELEEAVLFSIKNEARSILQQEEIDELRKVQAYDETKSYYEMQLENIKSRMEKIEKYKKKTYDNYMDDLISRDDYKKYVTEYDKEIGGLKQQQELINSKTDLEKEISTQYDEWVEAFINYVDIDKLTREIVIELIEKIEVNKDGSINIYYKFKNPYIS

SEQ ID NO: 379 - protein, 510 aa, Homo sapiens
MNTVIYARYSAGPRQTDQSIDGQLRVCTEFCKQRGLTVVDTYCDRHISGRTDERPEFQRLIADAKAHKFEAVVVYKTDRFARNKYDSAIYKRELRRNGIQIFYAAEAIPEGPEGIILESLMEGLAEYYSAELAQKIKRGLNESALKCQSLGSGRPLGYTVDEQKHFQIDPESSQAVKTIFEMYIKGESNAAICDYLNARGLRTSQGNLFNKNSINRIIKNRKYIGEYRYNDIVVEGGMPAIISKETFCMAQAEMERRRTHRAPVSPKAEYLLAGKLFCGHCKGPMQGVSGTGKSGNKWYYYYCANTRGKERTCDKKQVSRDRLEKAVVDFTVRYILQENVLEELSKKVYAAQERQNNTASEIAFYEKKLAENKKAIANILRAIESGAMTQALPARLQELENEQTVIQGELSYLKGARLAFTEDQILFALLQHLDPRPGESERDYHRRIITDFVSEVYLYDDRMLIYFNISSADGKLKHADLSAIESGVFDAGLISSSSRASSFSTRCALI

SEQ ID NO: 380 - protein, 482 aa, Homo sapiens
MNEKNLEIGAAYIRVSTDDQTELSPDAQLRVILEAAKKDGIIIPQEFVFMEDRGRSGRRADNRPEFQRMISTARQNPSPFRYLYLWKFSRFARNQEESAFYKGILRKKCGVTIKSVSEPIMEGMFGRLVEMIIEWSDEFYSVNLSGEVLRGMTQKALEHGYQLTPCLGYDAVGHGRPYVINEEQYQIVEFIHRSFFDGKDMTWIAREANRRGYHTRRGNPFDTRAVRIILTNSFYVGLVKWNDVTFQGTHECRESVTSVFSANQERLNRIHRPRGRRQASSCKHWLSGLLKCSICGASLGYNQTKDLTKRGHAFQCWKYTKGIHPGSCSVSSLKAEAAVLESLQMILETGEVEYTYEQREKHLDDNKLTLIQKSLERLDTKELRIREAYESGIDTLDEFKTNKARLQRERDQLMEELEELHSQEEPEDVPGKEILIERIQNVYDLLQSPDVDNDDKGNAVRSIIKKIVYIKESKTFCFYYYV

SEQ ID NO: 381 - protein, 406 aa, Homo sapiens
MERTIKVIQPGTVKIPTKKRVAAYARVSSGKDAMLHSLSAQVSYYSNMIQQKNEWSYVGIYADEAITGTKDRRVEFNRLIQDCTDGKIDMIITKSISRFARNTLTMLEVVRKLKNINVDVYFEKENIHSISGDGELMLTILASFAQEESRSVSENCKWRIRKGFEQGELINLRFLYGYRINKGKIEIYEKEAEIVRMIFDDYLNGEGCTRIGNKLRKMKVNKLRGGMWNSERVVDIIKNEKYTGNALLQKKYVKDHLSKKLVRNKGILTQYYAEGTHPAIIDIKTFEIAQKIMEANRTKFQGKCGSNRYLFTSKIECGICGKNYRHKDREGKSTWVCANHLKYGNSRCIAKPLNEEKLKKLINEALELKYFDEEIFIRNIKRIKVTGNQTIEFILKDGKVIEEGMI

SEQ ID NO: 382 - protein, 401 aa, Homo sapiens
MKKIKIDRAIQERPATRKQTRNEKIRQSLTEHVDVQVIPAITDREGYEKPKLRVCAYCRVSTDMDTQALSYELQVQNYTDYIRGNDEWRFAGIYADRGISGTSLKHRDEFNRMIEDCKAGKIDLIITKAVTRFARNVLDCISTIRMLKQLEHPVAVYFETERINTLDTTSETYLGLISLFAQGESESKSESLKWSYIRRWKRGTGIYPAWSLLGYEMGEDGKWQIVEAEAELVRIIYDMYLNGYSSPQIAEILTRSGVPTATNQTVWSSGGVLGILRNEKYCGNVLCQKTMTVDVFSHKAIKNTGQKTQYFIEGHHDPIILRSDWDRVQQMIDEKYYRKRRGRRTKPRIVLKGCLAGFTQIDLDWDEDDIARIFYSTTPAAEVATPAMADHIEIIKVKGEN

SEQ ID NO: 383 - protein, 476 aa, Homo sapiens
MKTAAAYIRVSTDDQVEYSPDSQIKLIRDYAKRNDYILPDEFIFRDDGISGKSAKHRPEFTKMIALAKSPEHPFDAILVWKFSRFARNQEESIVFKNILRKIGVEVRSVSEPISEDPFGSLVERIIEWTDEYYIINLSGEVKRGMLEKISRGQPVVPPPVGYKMENGQYIPDENAHFIKEIFEAYAAGEGARHIAQRLAAQGCLTKRGNPIDNRFVDYVLHNPVYIGKLRWSVNSHAASSRHYDSADIIVFDGTHEPLISSELWESVQKRLHEVKTLYPKYQRREQPVSFMLKGLVRCSSCGSTLCYCRTSEPSLQCHSYARGSCRQSHSINIATANEAVIKGLQLAVDKLDFAIAPAKPHYSADAPGTNKLLAAEYKKMERIKAAYANGTDTLEEYAANKKKISAEIARLEAELQQESNVKPINKKAFAKRVSEIIKYISDPHNSEAAKNQALRTVISYIIFDRAATTFNIIFHF

SEQ ID NO: 384 - protein, 550 aa, Homo sapiens
MKIAIYARKSKYSPTGESVENQIQLCKEYLQAKYKSETLEIDEYKDEGYSGGNTNRPDFKKLIAQIEDYDMLICYRLDRISRNVADFSSTLTLLQNNKCDFVSIKEQFDTTSPMGRAMIYISSVFAQLERETIAERIRDNMMELAKMGRWLGGTIPMGFDSEPITFIDENMKERSMTKLIPNVEELKVIELIYEKYLQLGSMGKVVTYLLQNNIKTKKGKDFTLGSIKVILTNPIYVKANQEVVNHLKTQGITICGDVDGKKALLTYNKTTGISNDVGTKTIVKDKSEWIAAVANHKGIIPADKWLQAQNIKDKNKDSFPALGRSNTTIASRVLRCDKCESTMGVTHGHINPVTGKKHYYYNCTLKKRSKGVRCDNKPAKAAEVDEAILITLENMFKAKSSIIDNLKAKNKARRIEMISSNRVDVINKIIEDKTKQIDNLVNKLSLDDDLTDILFKKIKGLKAEIKELEDELLTLTSDNIKLNEDEVVLDFTEKLLEKCSIIRTLDILEQQQIVDALIPLVTWNGDTEVLNIYPLGSPELELKEAESKKK

SEQ ID NO: 385 - protein, 493 aa, Homo sapiens
MKEKVSERKTGAIYIRVSTDKQEELSPDAQLRLLLDYAKKDSIDVPKEYIFQDNGISGRKANKRPAFQNMIALAKSKEHPIDTIIVWKFSRFARNQEESIVYKSLLKKNNVDVVSVSEPLIDGPFGSLIERIIEWMDEYYSIRLSGEVMRGMTQNAMRGHYQSDAPIGYTSPGDKKPPVINPDTVQIPLMIKDMFLSGSTQLQIARKLNDSGYRTKRGNLWDARGVRYVLENPFYIGKSRWNYTERGRRLKPADEVIYADGNWEALWDEDTFKEIQKRLALNMRKSKSRDISAAKHWLSGLLICSSCGGTLAFGGAHNMRGFQCWKYSKGFCSESHYISTGPIEKMVLEYLEAVMHSPALSYTVISSSSVDASSKLSDLERQLQKIDAKEKRIKAAYLNEIDTLEEYKANKTALEEERRTVEKEIEELTLSDVKYSKEDLDKKMKQNISDLLRVLRDESADYIQKGNMMRNVVDHIVFNRKNTSLDVFLKLVV

SEQ ID NO: 386 - protein, 404 aa, Homo sapiens
MKITKKQPLRPRGRSEDKRQSTKNVIRDAYINGPQKEVQIIPAKRDMEAETEKKKLRVCAYCRVSTDEDTQASSYELQVQNYTRMIRENPEWEFAGIFADEGISGTSVLHREHFLEMIEKCKAGEIDLIITKQVSRFARNVLDSLNYIFMLRKLDPPVGVYFETEKLNTLDKSSDMVITVLSLVAQSESEQKSNSLKWSFKRRRAQGLGIYPSWALLGYRLDDEKNWEIVEDEADIVRTIYSLYLDGYSSTQIAELLTKSGIPTVKGLSVWSSGSVLGILKNEKFCGDALCQKTVTIDFFTHKSVKNNGIEPQYFVEGHHIPIIEKNDWLLAQQIRKERRYRKRRSTHRKPRIVVKGALSGFMIVDTSWDEEYVDSLLISATQKPEPAPVIAEEDENFIVIEKE

SEQ ID NO: 387 - protein, 498 aa, Homo sapiens
MADIQPVKNGALYIRVSTHLQEELSPDAQKRLLMEYAEAHNIIVLKEHIYIDSGISGRSARQRPQFNNMIAEAKSKEHPFDVILVWKYSRFARNQEESIVYKSMLKRENVDVISVSEPISDDPFGSLIERIIEWMDEYYSIRLSGEVSRGMAENAMRGNYQARPPLGYRIPGYRQTPVIVPEEAELIQLIFDLYTEKKMGIFEIVRYLNEHGYQTGHKKPFQRRSVTYILKNPTYIGKTIWNQHDQDHKLRDKSEWIIADGKHEPIISKEQFDKAQKRIESTYKPAYRKPTSVCHHWLSSLLKCSSCGRTLVVKRTASKKKDRMYVNFQCYGYQKGICNTNQSISAIKLEPVIMHALEDAMTSGKIHFDVLNPTTLDSSQKQQFLTRLNEIEKKEERIKRAYRDGIDTLEEYKENKSIIQTEKEMLLKKIEHIEEPALSPEEAKPIMMDRIKNVYEIITNPDIGMEEKNKAARSIIEKIVFDRATGSVNIFFYLAHCP

SEQ ID NO: 388 - protein, 500 aa, Mycobacterium sp. [sequence omitted]

SEQ ID NO: 389 - protein, 485 aa, Lactococcus sp.
  source 1..485: note = Lactococcus phage
MTKKVAIYTRVSTTNQAEEGFSIDEQIDRLTKYAEAMGWQVSDTYTDAGFSGAKLERPAMQRLINDIENKAFDTVLVYKLDRLSRSVRDTLYLVKDVFTKNKIDFISLNESIDTSSAMGSLFLTILSAINEFERENIKERMTMGKLGRAKSGKSMMWTKTAFGYYHNRKTGILEIVPLQATIVEQIFTDYLSGISLTKLRDKLNESGHIGKDIPWSYRTLRQTLDNPVYCGYIKFKDSLFEGMHKPIIPYETYLKVQKELEERQQQTYERNNNPRPFQAKYMLSGMARCGYCGAPLKIVLGHKRKDGSRTMKYHCANRFPRKTKGITVYNDNKKCDSGTYDLSNLENTVIDNLIGFQENNDSLLKIINGNNQPILDTSSFKKQISQIDKKIQKNSDLYLNDFITMDELKDRTDSLQAEKKLLKAKISENKFNDSTDVFELVKTQLGSIPINELSYDNKKKIVNNLVSKVDVTADNVDIIFKFQLA

SEQ ID NO: 390 - protein, 594 aa, Streptomyces sp.
  source 1..594: note = Streptomyces virus
MSPFIAPDVPEHLLDTVRVFLYARQSKGRSDGSDVSTEAQLAAGRALVASRNAQGGARWVVAGEFVDVGRSGWDPNVTRADFERMMGEVRAGEGDVVVVNELSRLTRKGAHDALEIDNELKKHGVRFMSVLEPFLDTSTPIGVAIFALIAALAKQDSDLKAERLKGAKDEIAALGGVHSSSAPFGMRAVRKKVDNLVISVLEPDEDNPDHVELVERMAKMSFEGVSDNAIATTFEKEKIPSPGMAERRATEKRLASIKARRLNGAEKPIMWRAQTVRWILNHPAIGGFAFERVKHGKAHINVIRRDPGGKPLTPHTGILSGSKWLELQEKRSGKNLSDRKPGAEVEPTLLSGWRFLGCRICGGSMGQSQGGRKRNGDLAEGNYMCANPKGHGGLSVKRSELDEFVASKVWARLRTADMEDEHDQAWIAAAAERFALQHDLAGVADERREQQAHLDNVRRSIKDLQADRKAGLYVGREELETWRSTVLQYRSYEAECTTRLAELDEKMNGSTRVPSEWFSGEDPTAEGGIWASWDVYERREFLSFFLDSVMVDRGRHPETKKYIPLKDRVTLKWAELLKEEDEASEATERELAAL

SEQ ID NO: 391 - protein, 528 aa, Bacillus cereus
MYPYDVPDYAGSYRPESLDVCIYLRKSRKDVEEERRAIEEGSSYNALERHRKRLFAIAKAENHNIIDIFEEVASGESIQERPQMQQLLRKLEGNEIDGVLVIDLDRLGRGDMLDAGMIDRAFRYSSTKIITPTDVYDPDDESWELVFGIKSLISRQELKSITKRLQNGRIDSVKEGKHIGKKPPYGYLKDENLRLYPDPEKAWIVKKIFELMCDGKGRQMIAAELDRLGIDPPVTKRGAWDSSTITSIIKNEVYTGVIVWGKFKHKKRNGKYTRHKNPQEKWIMYENAHEPIISKELFDAANEAHSSRHKPAVITSKKLTNPLAGILKCKLCGYTMLIQTRKDRPHNYLRCNNPACKGKQKQSVFNLVEEKLLYSLQQIVDEYQAQKVEEVEIDDSKLISFKEKAIISKEKELKELQAQKGNLHDLLEQGIYTVEIFLERQKNLVERITSIENDIEVLQKEIETEQIKEHNKTEFIPALKTVIESYHKTTNIELKNQLLKTILSTVTYYRHPDWKTNEFEIQVYFKIS

SEQ ID NO: 392 - protein, 486 aa, Bacillus sp.
  source 1..486: note = Bacillus cytotoxicus
MYPYDVPDYAGSAVGIYIRVSTQEQASEGHSIESQKKKLASYCEIQGWDDYRFYIEEGISGKNTNRPKLKLLMEHIEKGKINILLVYRLDRLTRSVIDLHKLLNFLQEHGCAFKSATETYDTTTANGRMSMGIVSLLAQWETENMSERIKLNLEHKVLVEGERVGAIPYGFDLSDDEKLVKNEKSAILLDMVERVENGWSVNRIVNYLNLTNNDRNWSPNGVLRLLRNPALYGATRWNDKIAENTHEGIISKERFNRLQQILADRSIHHRRDVKGTYIFQGVLRCPVCDQTLSVNRFIKKRKDGTEYCGVLYRCQPCIKQNKYNLAIGEARFLKALNEYMSTVEFQTVEDEVIPKKSEREMLESQLQQIARKREKYQKAWASDLMSDDEFEKLMVETRETYDECKQKLESCEDPIKIDETYLKEIVYMFHQTFNDLESEKQKEFISKFIRTIRYTVKEQQPIRPDKSKTGKGKQKVIITEVEFYQS

SEQ ID NO: 393 - protein, 472 aa, Staphylococcus lugdunensis
MYPYDVPDYAGSKVAIYTRVSSAEQANEGYSIHEQKKKLISYCEIHDWNEYKVFTDAGISGGSMKRPALQKLMKHLSSFDLVLVYKLDRLTRNVRDLLDMLEEFEQYNVSFKSATEVFDTTSAIGKLFITMVGAMAEWERETIRERSLFGSRAAVREGNYIREAPFCYDNIEGKLHPNEYAKVIDLIVSMFKKGISANEIARRLNSSKVHVPNKKSWNRNSLIRLMRSPVLRGHTKYGDMLIENTHEPVLSEHDYNAINNAISSKTHKSKVKHHAIFRGALVCPQCNRRLHLYAGTVKDRKGYKYDVRRYKCETCSKNKDVKNVSFNESEVENKFVNLLKSYELNKFHIRKVEPVKKIEYDIDKINKQKINYTRSWSLGYIEDDEYFELMEEINATKKMIEEQTTENKQSVSKEQIQSINNFILKGWEELTIKDKEELILSTVDKIEFNFIPKDKKHKTNTLDINNIHFKFS

SEQ ID NO: 394 - DNA, 52 bp, synthetic construct
  source 1..52: mol_type = other DNA
gtggtttgtctggtcaaccaccgcggtctcagtggtgtacggtacaaaccca

SEQ ID NO: 395 - DNA, 52 bp, synthetic construct
  source 1..52: mol_type = other DNA
gtggtttgtctggtcaaccaccgcgcgctcagtggtgtacggtacaaaccca

SEQ ID NO: 396 - DNA, 52 bp, synthetic construct
  source 1..52: mol_type = other DNA
gtggtttgtctggtcaaccaccgcggcctcagtggtgtacggtacaaaccca

SEQ ID NO: 397 - DNA, 52 bp, synthetic construct
  source 1..52: mol_type = other DNA
gtggtttgtctggtcaaccaccgcgatctcagtggtgtacggtacaaaccca

SEQ ID NO: 398 - DNA, 52 bp, synthetic construct
  source 1..52: mol_type = other DNA
gtggtttgtctggtcaaccaccgcgtactcagtggtgtacggtacaaaccca

SEQ ID NO: 399 - DNA, 52 bp, synthetic construct
  source 1..52: mol_type = other DNA
gtggtttgtctggtcaaccaccgcgggctcagtggtgtacggtacaaaccca

SEQ ID NO: 400 - DNA, 52 bp, synthetic construct
  source 1..52: mol_type = other DNA
gtggtttgtctggtcaaccaccgcgttctcagtggtgtacggtacaaaccca

SEQ ID NO: 401 - DNA, 52 bp, synthetic construct
  source 1..52: mol_type = other DNA
gtggtttgtctggtcaaccaccgcggactcagtggtgtacggtacaaaccca

SEQ ID NO: 402 - DNA, 52 bp, synthetic construct
  source 1..52: mol_type = other DNA
gtggtttgtctggtcaaccaccgcgagctcagtggtgtacggtacaaaccca

SEQ ID NO: 403 - DNA, 52 bp, synthetic construct
  source 1..52: mol_type = other DNA
gtggtttgtctggtcaaccaccgcgccctcagtggtgtacggtacaaaccca

SEQ ID NO: 404 - DNA, 52 bp, synthetic construct
  source 1..52: mol_type = other DNA
gtggtttgtctggtcaaccaccgcgtcctcagtggtgtacggtacaaaccca

SEQ ID NO: 405 - DNA, 52 bp, synthetic construct
  source 1..52: mol_type = other DNA
gtggtttgtctggtcaaccaccgcgctctcagtggtgtacggtacaaaccca

SEQ ID NO: 406 - DNA, 52 bp, synthetic construct
  source 1..52: mol_type = other DNA
gtggtttgtctggtcaaccaccgcgaactcagtggtgtacggtacaaaccca

SEQ ID NO: 407 - DNA, 52 bp, synthetic construct
  source 1..52: mol_type = other DNA
gtggtttgtctggtcaaccaccgcgcactcagtggtgtacggtacaaaccca

SEQ ID NO: 408 - DNA, 52 bp, synthetic construct
  source 1..52: mol_type = other DNA
gtggtttgtctggtcaaccaccgcgacctcagtggtgtacggtacaaaccca

SEQ ID NO: 409 - DNA, 52 bp, synthetic construct
  source 1..52: mol_type = other DNA
gtggtttgtctggtcaaccaccgcgtgctcagtggtgtacggtacaaaccca

SEQ ID NO: 410 - DNA, 46 bp, synthetic construct
  source 1..46: mol_type = other DNA
ggccggcttgtcgacgacggcggtctccgtcgtcaggatcatccgg

SEQ ID NO: 411 - DNA, 46 bp, synthetic construct
  source 1..46: mol_type = other DNA
ggccggcttgtcgacgacggcgaactccgtcgtcaggatcatccgg

SEQ ID NO: 412 - DNA, 46 bp, synthetic construct
  source 1..46: mol_type = other DNA
ggccggcttgtcgacgacggcggactccgtcgtcaggatcatccgg

SEQ ID NO: 413 - DNA, 46 bp, synthetic construct
  source 1..46: mol_type = other DNA
ggccggcttgtcgacgacggcgcactccgtcgtcaggatcatccgg

SEQ ID NO: 414 - DNA, 46 bp, synthetic construct
  source 1..46: mol_type = other DNA
ggccggcttgtcgacgacggcgtactccgtcgtcaggatcatccgg

SEQ ID NO: 415 - DNA, 46 bp, synthetic construct
  source 1..46: mol_type = other DNA
ggccggcttgtcgacgacggcgagctccgtcgtcaggatcatccgg

SEQ ID NO: 416 - DNA, 46 bp, synthetic construct
  source 1..46: mol_type = other DNA
ggccggcttgtcgacgacggcgggctccgtcgtcaggatcatccgg

SEQ ID NO: 417 - DNA, 46 bp, synthetic construct
  source 1..46: mol_type = other DNA
ggccggcttgtcgacgacggcgcgctccgtcgtcaggatcatccgg

SEQ ID NO: 418 - DNA, 46 bp, synthetic construct
  source 1..46: mol_type = other DNA
ggccggcttgtcgacgacggcgtgctccgtcgtcaggatcatccgg

SEQ ID NO: 419 - DNA, 46 bp, synthetic construct
  source 1..46: mol_type = other DNA
ggccggcttgtcgacgacggcgacctccgtcgtcaggatcatccgg

SEQ ID NO: 420 - DNA, 46 bp, synthetic construct
  source 1..46: mol_type = other DNA
ggccggcttgtcgacgacggcggcctccgtcgtcaggatcatccgg

SEQ ID NO: 421 - DNA, 46 bp, synthetic construct
  source 1..46: mol_type = other DNA
ggccggcttgtcgacgacggcgccctccgtcgtcaggatcatccgg

SEQ ID NO: 422 - DNA, 46 bp, synthetic construct
  source 1..46: mol_type = other DNA
ggccggcttgtcgacgacggcgtcctccgtcgtcaggatcatccgg

SEQ ID NO: 423 - DNA, 46 bp, synthetic construct
  source 1..46: mol_type = other DNA
ggccggcttgtcgacgacggcgatctccgtcgtcaggatcatccgg

SEQ ID NO: 424 - DNA, 46 bp, synthetic construct
  source 1..46: mol_type = other DNA
ggccggcttgtcgacgacggcgctctccgtcgtcaggatcatccgg

SEQ ID NO: 425 - DNA, 46 bp, synthetic construct
  source 1..46: mol_type = other DNA
ggccggcttgtcgacgacggcgttctccgtcgtcaggatcatccgg

SEQ ID NO: 426 - DNA, 38 bp, synthetic construct
  source 1..38: mol_type = other DNA
ggcttgtcgacgacggcggtctccgtcgtcaggatcat

SEQ ID NO: 427 - DNA, 38 bp, synthetic construct
  source 1..38: mol_type = other DNA
ggcttgtcgacgacggcgaactccgtcgtcaggatcat

SEQ ID NO: 428 - DNA, 38 bp, synthetic construct
  source 1..38: mol_type = other DNA
ggcttgtcgacgacggcggactccgtcgtcaggatcat

SEQ ID NO: 429 - DNA, 38 bp, synthetic construct
  source 1..38: mol_type = other DNA
ggcttgtcgacgacggcgcactccgtcgtcaggatcat

SEQ ID NO: 430 - DNA, 38 bp, synthetic construct
  source 1..38: mol_type = other DNA
ggcttgtcgacgacggcgtactccgtcgtcaggatcat

SEQ ID NO: 431 - DNA, 38 bp, synthetic construct
  source 1..38: mol_type = other DNA
ggcttgtcgacgacggcgagctccgtcgtcaggatcat

SEQ ID NO: 432 - DNA, 38 bp, synthetic construct
  source 1..38: mol_type = other DNA
ggcttgtcgacgacggcgggctccgtcgtcaggatcat

SEQ ID NO: 433 - DNA, 38 bp, synthetic construct
  source 1..38: mol_type = other DNA
ggcttgtcgacgacggcgcgctccgtcgtcaggatcat

SEQ ID NO: 434 - DNA, 38 bp, synthetic construct
  source 1..38: mol_type = other DNA
ggcttgtcgacgacggcgtgctccgtcgtcaggatcat

SEQ ID NO: 435 - DNA, 38 bp, synthetic construct
  source 1..38: mol_type = other DNA
ggcttgtcgacgacggcgacctccgtcgtcaggatcat

SEQ ID NO: 436 - DNA, 38 bp, synthetic construct
  source 1..38: mol_type = other DNA
ggcttgtcgacgacggcggcctccgtcgtcaggatcat

SEQ ID NO: 437 - DNA, 38 bp, synthetic construct
  source 1..38: mol_type = other DNA
ggcttgtcgacgacggcgccctccgtcgtcaggatcat

SEQ ID NO: 438 - DNA, 38 bp, synthetic construct
  source 1..38: mol_type = other DNA
ggcttgtcgacgacggcgtcctccgtcgtcaggatcat

SEQ ID NO: 439 - DNA, 38 bp, synthetic construct
  source 1..38: mol_type = other DNA
ggcttgtcgacgacggcgatctccgtcgtcaggatcat

SEQ ID NO: 440 - DNA, 38 bp, synthetic construct
  source 1..38: mol_type = other DNA
ggcttgtcgacgacggcgctctccgtcgtcaggatcat

SEQ ID NO: 441 - DNA, 38 bp, synthetic construct
  source 1..38: mol_type = other DNA
ggcttgtcgacgacggcgttctccgtcgtcaggatcat

SEQ ID NO: 442 - DNA, 34 bp, synthetic construct
  source 1..34: mol_type = other DNA
taccgttcgtataatgtatgctatacgaagttat

SEQ ID NO: 443 - DNA, 34 bp, synthetic construct
  source 1..34: mol_type = other DNA
ataacttcgtataatgtatgctatacgaacggta

SEQ ID NO: 444 - DNA, 27 bp, synthetic construct
  source 1..27: mol_type = other DNA
tttaccttgattgagatgttaattgtg

SEQ ID NO: 445 - DNA, 50 bp, synthetic construct
  source 1..50: mol_type = other DNA
gcgagtttttatttcgtttatttcaattaaggtaactaaaaaactccttt

SEQ ID NO: 446 - DNA, 34 bp, synthetic construct
  source 1..34: mol_type = other DNA
ctggatcatctggatcactttcgtcaaaaacctg

SEQ ID NO: 447 - DNA, 57 bp, synthetic construct
  source 1..57: mol_type = other DNA
ttcgggtgctgggttgttgtctctggacagtgatccatgggaaactactcagcacca

SEQ ID NO: 448 - DNA, 38 bp, synthetic construct
  source 1..38: mol_type = other DNA
gatatggggaagtgaatcagtacaaccgccacagtacc

SEQ ID NO: 449 - DNA, 38 bp, synthetic construct
  source 1..38: mol_type = other DNA
tgggtggtacaggtgccacattagttgtaccatttatg

SEQ ID NO: 450 - DNA, 38 bp, synthetic construct
  source 1..38: mol_type = other DNA
gttgtttttccagatccagttggtcctgtaaatataag

SEQ ID NO: 451 - DNA, 30 bp, synthetic construct
  source 1..30: mol_type = other DNA
tggggaagtgaatcagtacaaccgccacag

SEQ ID NO: 452 - DNA, 28 bp, synthetic construct
  source 1..28: mol_type = other DNA
ggggaagtgaatcagtacaaccgccaca

SEQ ID NO: 453 - DNA, 26 bp, synthetic construct
  source 1..26: mol_type = other DNA
gggaagtgaatcagtacaaccgccac

SEQ ID NO: 454 - DNA, 30 bp, synthetic construct
  source 1..30: mol_type = other DNA
ctgtggcggttgtactgattcacttcccca

SEQ ID NO: 455 - DNA, 28 bp, synthetic construct
  source 1..28: mol_type = other DNA
tgtggcggttgtactgattcacttcccc

SEQ ID NO: 456 - DNA, 26 bp, synthetic construct
  source 1..26: mol_type = other DNA
gtggcggttgtactgattcacttccc

SEQ ID NO: 457 - DNA, 30 bp, synthetic construct
  source 1..30: mol_type = other DNA
tttttccagatccagttggtcctgtaaata

SEQ ID NO: 458 - DNA, 28 bp, synthetic construct
  source 1..28: mol_type = other DNA
ttttccagatccagttggtcctgtaaat

SEQ ID NO: 459 - DNA, 26 bp, synthetic construct
  source 1..26: mol_type = other DNA
tttccagatccagttggtcctgtaaa

SEQ ID NO: 460 - DNA, 30 bp, synthetic construct
  source 1..30: mol_type = other DNA
tatttacaggaccaactggatctggaaaaa

SEQ ID NO: 461 - DNA, 28 bp, synthetic construct
  source 1..28: mol_type = other DNA
atttacaggaccaactggatctggaaaa

SEQ ID NO: 462 - DNA, 26 bp, synthetic construct
  source 1..26: mol_type = other DNA
tttacaggaccaactggatctggaaa

SEQ ID NO: 463 - DNA, 50 bp, synthetic construct
  source 1..50: mol_type = other DNA
cattatatgtttttacaatccgggccgccatactgtaagaacatataatg

SEQ ID NO: 464 - DNA, 50 bp, synthetic construct
  source 1..50: mol_type = other DNA
cgttatagggtattgcagtaccgaccgccatactgtaataccctataacg

SEQ ID NO: 465 - DNA, 50 bp, synthetic construct
  source 1..50: mol_type = other DNA
tgtatcattttcatatagtgtgcaggtgctaactatatgaaaatgataca

SEQ ID NO: 466 - DNA, 50 bp, synthetic construct
  source 1..50: mol_type = other DNA
tgtctactatgtctttatgccacatgtgtcgcatatacagatagtagaca

SEQ ID NO: 467 - DNA, 50 bp, synthetic construct
  source 1..50: mol_type = other DNA
aatgaggtcagacgcatggagcgccgcctccgcatgcgtcagggtcgatg

SEQ ID NO: 468 - DNA, 50 bp, synthetic construct
  source 1..50: mol_type = other DNA
gttagtacccaaatgataaaaggatgaccttttgtcatttgggtactaac

SEQ ID NO: 469 - DNA, 50 bp, synthetic construct
  source 1..50: mol_type = other DNA
gtttataaaaccgatgccgctttgacagaagcggaacgggttttaataag

SEQ ID NO: 470 - DNA, 50 bp, synthetic construct
  source 1..50: mol_type = other DNA
ggccgcgaggtcgtgttcgtcgtcatgttgaggttcacgaccatcacgcc

SEQ ID NO: 471 - DNA, 50 bp, synthetic construct
  source 1..50: mol_type = other DNA
tataaactgatataattcaaagttataacttgatatattcaagatgtaga

SEQ ID NO: 472 - DNA, 50 bp, synthetic construct
  source 1..50: mol_type = other DNA
tattatatctaaaagcagtatggcggagcttagtgcttttagatataatt

SEQ ID NO: 473 - DNA, 52 bp, synthetic construct
  source 1..52: mol_type = other DNA
tgggtttgtaccgtacaccactgagaccgcggtggttgaccagacaaaccac

SEQ ID NO: 474 - DNA, 52 bp, synthetic construct
  source 1..52: mol_type = other DNA
tgggtttgtaccgtacaccactgagcgcgcggtggttgaccagacaaaccac

SEQ ID NO: 475 - DNA, 52 bp, synthetic construct
  source 1..52: mol_type = other DNA
tgggtttgtaccgtacaccactgaggccgcggtggttgaccagacaaaccac

SEQ ID NO: 476 - DNA, 52 bp, synthetic construct
  source 1..52: mol_type = other DNA
tgggtttgtaccgtacaccactgagatcgcggtggttgaccagacaaaccac

SEQ ID NO: 477 - DNA, 52 bp, synthetic construct
  source 1..52: mol_type = other DNA
tgggtttgtaccgtacaccactgagtacgcggtggttgaccagacaaaccac

SEQ ID NO: 478 - DNA, 52 bp, synthetic construct
  source 1..52: mol_type = other DNA
tgggtttgtaccgtacaccactgagcccgcggtggttgaccagacaaaccac

SEQ ID NO: 479 - DNA, 52 bp, synthetic construct
  source 1..52: mol_type = other DNA
tgggtttgtaccgtacaccactgagaacgcggtggttgaccagacaaaccac

SEQ ID NO: 480 - DNA, 52 bp, synthetic construct
  source 1..52: mol_type = other DNA
tgggtttgtaccgtacaccactgagtccgcggtggttgaccagacaaaccac

SEQ ID NO: 481 - DNA, 52 bp, synthetic construct
  source 1..52: mol_type = other DNA
tgggtttgtaccgtacaccactgagctcgcggtggttgaccagacaaaccac

SEQ ID NO: 482 - DNA, 52 bp, synthetic construct
  source 1..52: mol_type = other DNA
tgggtttgtaccgtacaccactgagggcgcggtggttgaccagacaaaccac

SEQ ID NO: 483 - DNA, 52 bp, synthetic construct
  source 1..52: mol_type = other DNA
tgggtttgtaccgtacaccactgaggacgcggtggttgaccagacaaaccac

SEQ ID NO: 484 - DNA, 52 bp, synthetic construct
  source 1..52: mol_type = other DNA
tgggtttgtaccgtacaccactgagagcgcggtggttgaccagacaaaccac

SEQ ID NO: 485 - DNA, 52 bp, synthetic construct
  source 1..52: mol_type = other DNA
tgggtttgtaccgtacaccactgagttcgcggtggttgaccagacaaaccac

SEQ ID NO: 486 - DNA, 52 bp, synthetic construct
  source 1..52: mol_type = other DNA
tgggtttgtaccgtacaccactgagtgcgcggtggttgaccagacaaaccac

SEQ ID NO: 487 - DNA, 52 bp, synthetic construct
  source 1..52: mol_type = other DNA
tgggtttgtaccgtacaccactgaggtcgcggtggttgaccagacaaaccac

SEQ ID NO: 488 - DNA, 52 bp, synthetic construct
  source 1..52: mol_type = other DNA
tgggtttgtaccgtacaccactgagcacgcggtggttgaccagacaaaccac

SEQ ID NO: 489 - DNA, 46 bp, synthetic construct
  source 1..46: mol_type = other DNA
ccggatgatcctgacgacggagaccgccgtcgtcgacaagccggcc

SEQ ID NO: 490 - DNA, 46 bp, synthetic construct
  source 1..46: mol_type = other DNA
ccggatgatcctgacgacggagttcgccgtcgtcgacaagccggcc

SEQ ID NO: 491 - DNA, 46 bp, synthetic construct
  source 1..46: mol_type = other DNA
ccggatgatcctgacgacggagtccgccgtcgtcgacaagccggcc

SEQ ID NO: 492 - DNA, 46 bp, synthetic construct
  source 1..46: mol_type = other DNA
ccggatgatcctgacgacggagtgcgccgtcgtcgacaagccggcc

SEQ ID NO: 493 - DNA, 46 bp, synthetic construct
  source 1..46: mol_type = other DNA
ccggatgatcctgacgacggagtacgccgtcgtcgacaagccggcc

SEQ ID NO: 494 - DNA, 46 bp, synthetic construct
  source 1..46: mol_type = other DNA
ccggatgatcctgacgacggagctcgccgtcgtcgacaagccggcc

SEQ ID NO: 495 - DNA, 46 bp, synthetic construct
  source 1..46: mol_type = other DNA
ccggatgatcctgacgacggagcccgccgtcgtcgacaagccggcc

SEQ ID NO: 496 - DNA, 46 bp, synthetic construct
  source 1..46: mol_type = other DNA
ccggatgatcctgacgacggagcgcgccgtcgtcgacaagccggcc

SEQ ID NO: 497 - DNA, 46 bp, synthetic construct
  source 1..46: mol_type = other DNA
ccggatgatcctgacgacggagcacgccgtcgtcgacaagccggcc

SEQ ID NO: 498 - DNA, 46 bp, synthetic construct
  source 1..46: mol_type = other DNA
ccggatgatcctgacgacggaggtcgccgtcgtcgacaagccggcc

SEQ ID NO: 499 - DNA, 46 bp, synthetic construct
  source 1..46: mol_type = other DNA
ccggatgatcctgacgacggaggccgccgtcgtcgacaagccggcc

SEQ ID NO: 500 - DNA, 46 bp, synthetic construct
  source 1..46: mol_type = other DNA
ccggatgatcctgacgacggagggcgccgtcgtcgacaagccggcc

SEQ ID NO: 501 - DNA, 46 bp, synthetic construct
  source 1..46: mol_type = other DNA
ccggatgatcctgacgacggaggacgccgtcgtcgacaagccggcc

SEQ ID NO: 502 - DNA, 46 bp, synthetic construct
  source 1..46: mol_type = other DNA
ccggatgatcctgacgacggagatcgccgtcgtcgacaagccggcc

SEQ ID NO: 503 - DNA, 46 bp, synthetic construct
  source 1..46: mol_type = other DNA
ccggatgatcctgacgacggagagcgccgtcgtcgacaagccggcc

SEQ ID NO: 504 - DNA, 46 bp, synthetic construct
  source 1..46: mol_type = other DNA
ccggatgatcctgacgacggagaacgccgtcgtcgacaagccggcc

SEQ ID NO: 505 - DNA, 38 bp, synthetic construct
  source 1..38: mol_type = other DNA
atgatcctgacgacggagaccgccgtcgtcgacaagcc

SEQ ID NO: 506 - DNA, 38 bp, synthetic construct
  source 1..38: mol_type = other DNA
atgatcctgacgacggagttcgccgtcgtcgacaagcc

SEQ ID NO: 507 - DNA, 38 bp, synthetic construct
  source 1..38: mol_type = other DNA
atgatcctgacgacggagtccgccgtcgtcgacaagcc

SEQ ID NO: 508 - DNA, 38 bp, synthetic construct
  source 1..38: mol_type = other DNA
atgatcctgacgacggagtgcgccgtcgtcgacaagcc

SEQ ID NO: 509 - DNA, 38 bp, synthetic construct
  source 1..38: mol_type = other DNA
atgatcctgacgacggagtacgccgtcgtcgacaagcc

SEQ ID NO: 510 - DNA, 38 bp, synthetic construct
  source 1..38: mol_type = other DNA
atgatcctgacgacggagctcgccgtcgtcgacaagcc

SEQ ID NO: 511 - DNA, 38 bp, synthetic construct
  source 1..38: mol_type = other DNA
atgatcctgacgacggagcccgccgtcgtcgacaagcc

SEQ ID NO: 512 - DNA, 38 bp, synthetic construct
  source 1..38: mol_type = other DNA
atgatcctgacgacggagcgcgccgtcgtcgacaagcc

SEQ ID NO: 513 - DNA, 38 bp, synthetic construct
  source 1..38: mol_type = other DNA
atgatcctgacgacggagcacgccgtcgtcgacaagcc

SEQ ID NO: 514 - DNA, 38 bp, synthetic construct
  source 1..38: mol_type = other DNA
atgatcctgacgacggaggtcgccgtcgtcgacaagcc

SEQ ID NO: 515 - DNA, 38 bp, synthetic construct
  source 1..38: mol_type = other DNA
atgatcctgacgacggaggccgccgtcgtcgacaagcc

SEQ ID NO: 516 - DNA, 38 bp, synthetic construct
  source 1..38: mol_type = other DNA
atgatcctgacgacggagggcgccgtcgtcgacaagcc

SEQ ID NO: 517 - DNA, 38 bp, synthetic construct
  source 1..38: mol_type = other DNA
atgatcctgacgacggaggacgccgtcgtcgacaagcc

SEQ ID NO: 518 - DNA, 38 bp, synthetic construct
  source 1..38: mol_type = other DNA
atgatcctgacgacggagatcgccgtcgtcgacaagcc

SEQ ID NO: 519 - DNA, 38 bp, synthetic construct
  source 1..38: mol_type = other DNA
atgatcctgacgacggagagcgccgtcgtcgacaagcc

SEQ ID NO: 520 - DNA, 38 bp, synthetic construct
  source 1..38: mol_type = other DNA
atgatcctgacgacggagaacgccgtcgtcgacaagcc

SEQ ID NO: 521 - DNA, 34 bp, synthetic construct
  source 1..34: mol_type = other DNA
ataacttcgtatagcatacattatacgaacggta

SEQ ID NO: 522 - DNA, 34 bp, synthetic construct
  source 1..34: mol_type = other DNA
taccgttcgtatagcatacattatacgaagttat

SEQ ID NO: 523 - DNA, 27 bp, synthetic construct
  source 1..27: mol_type = other DNA
cacaattaacatctcaatcaaggtaaa

SEQ ID NO: 524 - DNA, 50 bp, synthetic construct
  source 1..50: mol_type = other DNA
aaaggagttttttagttaccttaattgaaataaacgaaataaaaactcgc

SEQ ID NO: 525 - DNA, 34 bp, synthetic construct
  source 1..34: mol_type = other DNA
caggtttttgacgaaagtgatccagatgatccag

SEQ ID NO: 526 - DNA, 57 bp, synthetic construct
  source 1..57: mol_type = other DNA
tggtgctgagtagtttcccatggatcactgtccagagacaacaacccagcacccgaa

SEQ ID NO: 527 - DNA, 38 bp, synthetic construct
  source 1..38: mol_type = other DNA
ggtactgtggcggttgtactgattcacttccccatatc

SEQ ID NO: 528 - DNA, 38 bp, synthetic construct
  source 1..38: mol_type = other DNA
cataaatggtacaactaatgtggcacctgtaccaccca

SEQ ID NO: 529 - DNA, 38 bp, synthetic construct
  source 1..38: mol_type = other DNA
cttatatttacaggaccaactggatctggaaaaacaac

SEQ ID NO: 530 - DNA, 50 bp, synthetic construct
  source 1..50: mol_type = other DNA
cattatatgttcttacagtatggcggcccggattgtaaaaacatataatg

SEQ ID NO: 531 - DNA, 50 bp, synthetic construct
  source 1..50: mol_type = other DNA
cgttatagggtattacagtatggcggtcggtactgcaataccctataacg

SEQ ID NO: 532 - DNA, 50 bp, synthetic construct
  source 1..50: mol_type = other DNA
tgtatcattttcatatagttagcacctgcacactatatgaaaatgataca

SEQ ID NO: 533 - DNA, 50 bp, synthetic construct
  source 1..50: mol_type = other DNA
tgtctactatctgtatatgcgacacatgtggcataaagacatagtagaca

SEQ ID NO: 534 - DNA, 50 bp, synthetic construct
  source 1..50: mol_type = other DNA
catcgaccctgacgcatgcggaggcggcgctccatgcgtctgacctcatt

SEQ ID NO: 535 - DNA, 50 bp, synthetic construct
  source 1..50: mol_type = other DNA
gttagtacccaaatgacaaaaggtcatccttttatcatttgggtactaac

SEQ ID NO: 536 - DNA, 50 bp, synthetic construct
  source 1..50: mol_type = other DNA
cttattaaaacccgttccgcttctgtcaaagcggcatcggttttataaac

SEQ ID NO: 537 - DNA, 50 bp, synthetic construct
  source 1..50: mol_type = other DNA
ggcgtgatggtcgtgaacctcaacatgacgacgaacacgacctcgcggcc

SEQ ID NO: 538 - DNA, 50 bp, synthetic construct
  source 1..50: mol_type = other DNA
tctacatcttgaatatatcaagttataactttgaattatatcagtttata

SEQ ID NO: 539 - DNA, 50 bp, synthetic construct
  source 1..50: mol_type = other DNA
aattatatctaaaagcactaagctccgccatactgcttttagatataata

SEQ ID NO: 540 - DNA, 52 bp, synthetic construct
  source 1..52: mol_type = other DNA
gtggtttgtttgatgaacaactgcagtctcagtggtgtacggtacaaaccca

SEQ ID NO: 541 - DNA, 52 bp, synthetic construct
  source 1..52: mol_type = other DNA
gtggtttgtttggttaaccacagcggtctcagtggtgtacggtacaaaccca

SEQ ID NO: 542 - DNA, 52 bp, synthetic construct
  source 1..52: mol_type = other DNA
gtggtttgtttgatgaaccactgaagtctcagtggtgtacggtacaaaccca

SEQ ID NO: 543 - DNA, 60 bp, synthetic construct
  source 1..60: mol_type = other DNA
ggcggcggcggcagcggcggcggcggcagcggcggcggcggcagcggcggcggcggcagc

SEQ ID NO: 544 - DNA, 24 bp, synthetic construct
  source 1..24: mol_type = other DNA
ggcggcgcgagcccggcgggcggc

SEQ ID NO: 545 - DNA, 36 bp, synthetic construct
  source 1..36: mol_type = other DNA
ggcggcgcgagcccggcggcgccggcgccggcgggc

SEQ ID NO: 546 - DNA, 126 bp, synthetic construct
  source 1..126: mol_type = other DNA
gcggaagcggcgaaagaagcggcgaaagaagcggcgaaagaagcggcgaaagcgctggaagcggaagcggcggcgaaagaagcggcggcgaaagaagcggcggcgaaagaagcggcggcgaaagcg

SEQ ID NO: 547 - DNA, 66 bp, synthetic construct
  source 1..66: mol_type = other DNA
gcgcatcatagcgaagatccgggcggcggcggcagcggcggcggcggcagcggcggcggcggcagc

SEQ ID NO: 548 - DNA, 45 bp, synthetic construct
  source 1..45: mol_type = other DNA
ggcggcggcggcagcgaagcggcggcgaaaggcggcggcggcagc

SEQ ID NO: 549 - DNA, 45 bp, synthetic construct
  source 1..45: mol_type = other DNA
gaagcggcggcgaaaggcggcggcggcagcgaagcggcggcgaaa

SEQ ID NO: 550 - DNA, 102 bp, synthetic construct
  source 1..102: mol_type = other DNA
agcggcggcagcagcggcggcagcagcggcagcgaaaccccgggcaccagcgaaagcgcgaccccggaaagcagcggcggcagcagcggcggcagcagcacc

SEQ ID NO: 551 - protein, 20 aa, synthetic construct
GGGGSGGGGSGGGGSGGGGS

SEQ ID NO: 552 - protein, 8 aa, synthetic construct
GGASPAGG

SEQ ID NO: 553 - protein, 12 aa, synthetic construct
GGASPAAPAPAG

SEQ ID NO: 554 - protein, 42 aa, synthetic construct
AEAAKEAAKEAAKEAAKALEAEAAAKEAAAKEAAAKEAAAKA

SEQ ID NO: 555 - protein, 22 aa, synthetic construct
AHHSEDPGGGGSGGGGSGGGGS

SEQ ID NO: 556 - protein, 15 aa, synthetic construct
GGGGSEAAAKGGGGS

SEQ ID NO: 557 - protein, 15 aa, synthetic construct
EAAAKGGGGSEAAAK

SEQ ID NO: 558 - protein, 34 aa, synthetic construct
SGGSSGGSSGSETPGTSESATPESSGGSSGGSST

SEQ ID NO: 559 - DNA, 148 bp, synthetic construct
  source 1..148: mol_type = other DNA
gacgcgttttacccggagcagtttaagagctatgctggaaacagcatagcaagtttaaataaggctagtccgttatcaacttgaaaaagtggcaccgagtcggtgcacgacggagaccgccgtcgtcgacaagcctccgggtaaaacg

SEQ ID NO: 560 - DNA, 148 bp, synthetic construct
  source 1..148: mol_type = other DNA
acaaggggataaaggtcgctgtttaagagctatgctggaaacagcatagcaagtttaaataaggctagtccgttatcaacttgaaaaagtggcaccgagtcggtgcacgacggcggtctccgtcgtcaggatcatgacctttatcccc

SEQ ID NO: 561 - DNA, 138 bp, synthetic construct
  source 1..138: mol_type = other DNA
cttgtatgccccgagaagtggttttagagctagaaatagcaagttaaaataaggctagtccgttatcaacttgaaaaagtggcaccgagtcggtgcacgacggagaccgccgtcgtcgacaagccttctcggggcata

SEQ ID NO: 562 - DNA, 138 bp, synthetic construct
  source 1..138: mol_type = other DNA
tatatatacttgctagggctgttttagagctagaaatagcaagttaaaataaggctagtccgttatcaacttgaaaaagtggcaccgagtcggtgcacgacggcggtctccgtcgtcaggatcatcctagcaagtata

SEQ ID NO: 563 - DNA, 4732 bp, synthetic construct
  source 1..4732: mol_type = other DNA
tcgcgcgtttcggtgatgacggtgaaaacctctgacacatgcagctcccggagacggtcacagcttgtctgtaagcggatgccgggagcagacaagcccgtcagggcgcgtcagcgggtgttggcgggtgtcggggctggcttaactatgcggcatcagagcagattgtactgagagtgcaccatatgcggtgtgaaataccgcacagatgcgtaaggagaaaataccgcatcaggcgccattcgccattcaggctgcgcaactgttgggaagggcgatcggtgcgggcctcttcgctattacgccagctggcgaaagggggatgtgctgcaaggcgattaagttgggtaacgccagggttttcccagtcacgacgttgtaaaacgacggccagtgaattcgagctctcgctattacttggccactccctctctgcgcgctcgctcgctcactgaggccgggcgaccaaaggtcgcccgacgcccgggctttgcccgggcggcctcagtgagcgagcgagcgcgcagagagggagtggccaactccatcactaggggttcctcactgcccgcagatctactagtggcttgtcgacgacggcggtctccgtcgtcaggatcattaggtcagtgaagagaagaacaaaaagcagcatattacagttagttgtcttcatcaatctttaaatatgttgtgtggtttttctctccctgtttccacagttatgggcaacagcttcagcaccagcgccttcggccctgtggccttttctctgggcctcctgctcgtgctgcctgccgcttttccagctcctgtgttcaccctggaagatttcgtgggagattggcggcagaccgccggctacaacctggaccaagtgctggaacagggcggagtgtccagcctgtttcagaacctgggcgtctccgtgacccctatccagcggatcgtgctgagcggcgagaacggcctgaaaatcgacatccatgtgattatcccctacgagggcctgagcggagatcagatgggccagatcgagaaaatcttcaaggtggtgtaccccgtcgacgaccaccacttcaaggtgatcctgcactacggcaccctggtgatcgacggcgttacccctaacatgatcgactacttcggcagaccctatgagggaattgccgtgttcgacggcaagaaaatcaccgtgaccggcacactgtggaacggcaacaagatcatcgatgagcgcctgatcaacccagacggcagcctgctgttcagagtgacaatcaatggcgtgacaggctggagactttgtgaaagaatcctggccggttctggcgagggcagaggatctctgctgacatgcggcgatgtggaagagaatcctggacctgctatgaaaatcgagtgcagaattacaggcacactgaacggagttgaattcgagctggtcggcggaggcgagggcacacctgagcagggcagaatgaccaacaagatgaaaagcaccaagggcgccctgaccttttctccttacctgctgagccacgtgatgggctatggcttctaccacttcggcacctaccccagcggctatgaaaaccccttcctgcatgctatcaacaacggaggctacaccaataccagaatcgagaagtacgaggacggcggcgtgctgcacgtgtccttcagctacagatacgaggccggcagagtgatcggcgacttcaaggtggtgggcacaggatttccagaagatagcgtgatcttcaccgacaagatcatccggagcaacgccaccgtggaacacctgcaccccatgggcgataatgtgctggtgggctcctttgctagaacattctccctgcgggacggcggatactacagcttcgtggtcgacagccacatgcacttcaagtctgccatccacccttctatcctgcagaacggcggacctatgttcgccttccggcgggtggaggaactccacagcaacaccgagctgggcatcgtggaataccagcacgcctttaagacccctatcgccttcgccagaagcagagccaggtgagagtttaaacccgctgatcagcctcgactgtgccttctagttgccagccatctgttgtttgcccctcccccgtgccttccttgaccctggaaggtgccactcccactgtcctttcctaataaaatgagaaaattgcatcgcattgtctgagtaggtgtcattctattctggggggtggggtggggcaggacagcaagggggaggattgggaagacaatagcaggcatgctggggatgcggtgggctctatggactagtagatctcactgcccgcccactccctctctgcgcgctcgctcgctcactgaggccgggcgaccaaaggtcgcccgacgcccgggctttgcccgggcggcctcagtgagcgagcgagcgcgcagagagggatgcattaatgggatcctctagagtcgacctgcaggcatgcaagcttggcgtaatcatggtcatagctgtttcctgtgtgaaattgttatccgctcacaattccacacaacatacgagccggaagcataaagtgtaaagcctggggtgcctaatgagtgagctaactcacattaattgcgttgcgctcactgcccgctttccagtcgggaaacctgtcgtgccagctgcattaatgaatcggccaacgcgcggggagaggcggtttgcgtattgggcgctcttccgcttcctcgctcactgactcgctgcgctcggtcgttcggctgcggcgagcggtatcagctcactcaaaggcggtaatacggttatccacagaatcaggggataacgcaggaaagaacatgtgagcaaaaggccagcaaaaggccaggaaccgtaaaaaggccgcgttgctggcgtttttccataggctccgcccccctgacgagcatcacaaaaatcgacgctcaagtcagaggtggcgaaacccgacaggactataaagataccaggcgtttccccctggaagctccctcgtgcgctctcctgttccgaccctgccgcttaccggatacctgtccgcctttctcccttcgggaagcgtggcgctttctcatagctcacgctgtaggtatctcagttcggtgtaggtcgttcgctccaagctgggctgtgtgcacgaaccccccgttcagcccgaccgctgcgccttatccggtaactatcgtcttgagtccaacccggtaagacacgacttatcgccactggcagcagccactggtaacaggattagcagagcgaggtatgtaggcggtgctacagagttcttgaagtggtggcctaactacggctacactagaaggacagtatttggtatctgcgctctgctgaagccagttaccttcggaaaaagagttggtagctcttgatccggcaaacaaaccaccgctggtagcggtggtttttttgtttgcaagcagcagattacgcgcagaaaaaaaggatctcaagaagatcctttgatcttttctacggggtctgacgctcagtggaacgaaaactcacgttaagggattttggtcatgagattatcaaaaaggatcttcacctagatccttttaaattaaaaatgaagttttaaatcaatctaaagtatatatgagtaaacttggtctgacagttaccaatgcttaatcagtgaggcacctatctcagcgatctgtctatttcgttcatccatagttgcctgactccccgtcgtgtagataactacgatacgggagggcttaccatctggccccagtgctgcaatgataccgcgagacccacgctcaccggctccagatttatcagcaataaaccagccagccggaagggccgagcgcagaagtggtcctgcaactttatccgcctccatccagtctattaattgttgccgggaagctagagtaagtagttcgccagttaatagtttgcgcaacgttgttgccattgctacaggcatcgtggtgtcacgctcgtcgtttggtatggcttcattcagctccggttcccaacgatcaaggcgagttacatgatcccccatgttgtgcaaaaaagcggttagctccttcggtcctccgatcgttgtcagaagtaagttggccgcagtgttatcactcatggttatggcagcactgcataattctcttactgtcatgccatccgtaagatgcttttctgtgactggtgagtactcaaccaagtcattctgagaatagtgtatgcggcgaccgagttgctcttgcccggcgtcaatacgggataataccgcgccacatagcagaactttaaaagtgctcatcattggaaaacgttcttcggggcgaaaactctcaaggatcttaccgctgttgagatccagttcgatgtaacccactcgtgcacccaactgatcttcagcatcttttactttcaccagcgtttctgggtgagcaaaaacaggaaggcaaaatgccgcaaaaaagggaataagggcgacacggaaatgttgaatactcatactcttcctttttcaatattattgaagcatttatcagggttattgtctcatgagcggatacatatttgaatgtatttagaaaaataaacaaataggggttccgcgcacatttccccgaaaagtgccacctgacgtctaagaaaccattattatcatgacattaacctataaaaataggcgtatcacgaggccctttcgtc

SEQ ID NO: 564 - RNA, 131 nt, synthetic construct
  source 1..131: mol_type = other RNA
  modified_base order(1..3,29..40,69..96,129..131): mod_base = OTHER; note = 2-Prime-O-methyl ribonucleotides
  modified_base order(1..4,128..131): mod_base = OTHER; note = Phosphorothioate linkages
gacgcgttttacccggagcagttttagagctagaaatagcaagttaaaataaggctagtccgttatcaacttgaaaaagtggcaccgagtcggtgcagaccgccgtcgtcgacaagcctccgggtaaaacg

SEQ ID NO: 565 - RNA, 131 nt, synthetic construct
  source 1..131: mol_type = other RNA
  modified_base order(1..3,29..40,69..96,129..131): mod_base = OTHER; note = 2-Prime-O-methyl ribonucleotides
  modified_base order(1..4,128..131): mod_base = OTHER; note = Phosphorothioate linkages
acaaggggataaaggtcgctgttttagagctagaaatagcaagttaaaataaggctagtccgttatcaacttgaaaaagtggcaccgagtcggtgccggtctccgtcgtcaggatcatgacctttatcccc

SEQ ID NO: 566 - RNA, 131 nt, synthetic construct
  source 1..131: mol_type = other RNA
  modified_base order(1..3,29..40,69..96,129..131): mod_base = OTHER; note = 2-Prime-O-methyl ribonucleotides
  modified_base order(1..4,129..131): mod_base = OTHER; note = Phosphorothioate linkages
agtgacagtgccaggatcaggttttagagctagaaatagcaagttaaaataaggctagtccgttatcaacttgaaaaagtggcaccgagtcggtgcagaccgccgtcgtcgacaagccatcctggcactgt

SEQ ID NO: 567 - RNA, 131 nt, synthetic construct
  source 1..131: mol_type = other RNA
  modified_base order(1..3,29..40,69..96,129..131): mod_base = OTHER; note = 2-Prime-O-methyl ribonucleotides
  modified_base order(1..4,129..131): mod_base = OTHER; note = Phosphorothioate linkages
gttgacatcatgtctggagtgttttagagctagaaatagcaagttaaaataaggctagtccgttatcaacttgaaaaagtggcaccgagtcggtgccggtctccgtcgtcaggatcatccagacatgatgt

SEQ ID NO: 568 - DNA, 86 bp, synthetic construct
  source 1..86: mol_type = other DNA
ataacttcgtataatgtatgctatacgaagttatgtggtttgtctggtcaaccaccgcggtctcagtggtgtacggtacaaaccca

SEQ ID NO: 569 - DNA, 86 bp, synthetic construct
  source 1..86: mol_type = other DNA
tattgaagcatattacatacgatatgcttcaatacaccaaacagaccagttggtggcgccagagtcaccacatgccatgtttgggt

SEQ ID NO: 570 - DNA, 86 bp, synthetic construct
  source 1..86: mol_type = other DNA
gaagttcctattctctagaaagtataggaacttcgtggtttgtctggtcaaccaccgcggtctcagtggtgtacggtacaaaccca

SEQ ID NO: 571 - DNA, 86 bp, synthetic construct
  source 1..86: mol_type = other DNA
cttcaaggataagagatctttcatatccttgaagcaccaaacagaccagttggtggcgccagagtcaccacatgccatgtttgggt

SEQ ID NO: 572 - DNA, 99 bp, synthetic construct
  source 1..99: mol_type = other DNA
tggccggcttgtcgacgacggcgccctccgtcgtcaggatcatccgggtggtttgtctggtcaaccaccgcggtctcagtggtgtacggtacaaaccca

SEQ ID NO: 573 - DNA, 99 bp, synthetic construct
  source 1..99: mol_type = other DNA
accggccgaacagctgctgccgcgggaggcagcagtcctagtaggcccaccaaacagaccagttggtggcgccagagtcaccacatgccatgtttgggt

SEQ ID NO: 574 - DNA, 98 bp, synthetic construct
  source 1..98: mol_type = other DNA
gtggtttgtctggtcaaccaccgcggtctcagtggtgtacggtacaaacccataggtcagtgaagagaagaacaaaaagcagcatattacagttagtt

SEQ ID NO: 575 - DNA, 98 bp, synthetic construct
  source 1..98: mol_type = other DNA
caccaaacagaccagttggtggcgccagagtcaccacatgccatgtttgggtatccagtcacttctcttcttgtttttcgtcgtataatgtcaatcaa

SEQ ID NO: 576 - DNA, 49 bp, synthetic construct
  source 1..49: mol_type = other DNA
gtggtttgtctggtcaaccaccgcgccctccgtcgtcaggatcatccgg

SEQ ID NO: 577 - DNA, 49 bp, synthetic construct
  source 1..49: mol_type = other DNA
caccaaacagaccagttggtggcgcgggaggcagcagtcctagtaggcc

SEQ ID NO: 578 - protein, 1452 aa, synthetic construct
MRLEIRAAFLRQRNTALRTEVAELEQEVQRLENEVSQYETRYGPLGGGKGGGGSGGKRTADGSEFESPKKKRKVDKKYSIGLDIGTNSVGWAVITDEYKVPSKKFKVLGNTDRHSIKKNLIGALLFDSGETAEATRLKRTARRRYTRRKNRICYLQEIFSNEMAKVDDSFFHRLEESFLVEEDKKHERHPIFGNIVDEVAYHEKYPTIYHLRKKLVDSTDKADLRLIYLALAHMIKFRGHFLIEGDLNPDNSDVDKLFIQLVQTYNQLFEENPINASGVDAKAILSARLSKSRRLENLIAQLPGEKKNGLFGNLIALSLGLTPNFKSNFDLAEDAKLQLSKDTYDDDLDNLLAQIGDQYADLFLAAKNLSDAILLSDILRVNTEITKAPLSASMIKRYDEHHQDLTLLKALVRQQLPEKYKEIFFDQSKNGYAGYIDGGASQEEFYKFIKPILEKMDGTEELLVKLNREDLLRKQRTFDNGSIPHQIHLGELHAILRRQEDFYPFLKDNREKIEKILTFRIPYYVGPLARGNSRFAWMTRKSEETITPWNFEEVVDKGASAQSFIERMTNFDKNLPNEKVLPKHSLLYEYFTVYNELTKVKYVTEGMRKPAFLSGEQKKAIVDLLFKTNRKVTVKQLKEDYFKKIECFDSVEISGVEDRFNASLGTYHDLLKIIKDKDFLDNEENEDILEDIVLTLTLFEDREMIEERLKTYAHLFDDKVMKQLKRRRYTGWGRLSRKLINGIRDKQSGKTILDFLKSDGFANRNFMQLIHDDSLTFKEDIQKAQVSGQGDSLHEHIANLAGSPAIKKGILQTVKVVDELVKVMGRHKPENIVIEMARENQTTQKGQKNSRERMKRIEEGIKELGSQILKEHPVENTQLQNEKLYLYYLQNGRDMYVDQELDINRLSDYDVDAIVPQSFLKDDSIDNKVLTRSDKNRGKSDNVPSEEVVKKMKNYWRQLLNAKLITQRKFDNLTKAERGGLSELDKAGFIKRQLVETRQITKHVAQILDSRMNTKYDENDKLIREVKVITLKSKLVSDFRKDFQFYKVREINNYHHAHDAYLNAVVGTALIKKYPKLESEFVYGDYKVYDVRKMIAKSEQEIGKATAKYFFYSNIMNFFKTEITLANGEIRKRPLIETNGETGEIVWDKGRDFATVRKVLSMPQVNIVKKTEVQTGGFSKESILPKRNSDKLIARKKDWDPKKYGGFDSPTVAYSVLVVAKVEKGKSKKLKSVKELLGITIMERSSFEKNPIDFLEAKGYKEVKKDLIIKLPKYSLFELENGRKRMLASAGELQKGNELALPSKYVNFLYLASHYEKLKGSPEDNEQKQLFVEQHKHYLDEIIEQISEFSKRVILADANLDKVLSAYNKHRDKPIREQAENIIHLFTLTNLGAPAAFKYFDTTIDRKRYTSTKEVLDATLIHQSITGLYETRIDLSQLGGDGGGSPKKKRKV

SEQ ID NO: 579 - protein, 1451 aa, synthetic construct
MKRTADGSEFESPKKKRKVDKKYSIGLDIGTNSVGWAVITDEYKVPSKKFKVLGNTDRHSIKKNLIGALLFDSGETAEATRLKRTARRRYTRRKNRICYLQEIFSNEMAKVDDSFFHRLEESFLVEEDKKHERHPIFGNIVDEVAYHEKYPTIYHLRKKLVDSTDKADLRLIYLALAHMIKFRGHFLIEGDLNPDNSDVDKLFIQLVQTYNQLFEENPINASGVDAKAILSARLSKSRRLENLIAQLPGEKKNGLFGNLIALSLGLTPNFKSNFDLAEDAKLQLSKDTYDDDLDNLLAQIGDQYADLFLAAKNLSDAILLSDILRVNTEITKAPLSASMIKRYDEHHQDLTLLKALVRQQLPEKYKEIFFDQSKNGYAGYIDGGASQEEFYKFIKPILEKMDGTEELLVKLNREDLLRKQRTFDNGSIPHQIHLGELHAILRRQEDFYPFLKDNREKIEKILTFRIPYYVGPLARGNSRFAWMTRKSEETITPWNFEEVVDKGASAQSFIERMTNFDKNLPNEKVLPKHSLLYEYFTVYNELTKVKYVTEGMRKPAFLSGEQKKAIVDLLFKTNRKVTVKQLKEDYFKKIECFDSVEISGVEDRFNASLGTYHDLLKIIKDKDFLDNEENEDILEDIVLTLTLFEDREMIEERLKTYAHLFDDKVMKQLKRRRYTGWGRLSRKLINGIRDKQSGKTILDFLKSDGFANRNFMQLIHDDSLTFKEDIQKAQVSGQGDSLHEHIANLAGSPAIKKGILQTVKVVDELVKVMGRHKPENIVIEMARENQTTQKGQKNSRERMKRIEEGIKELGSQILKEHPVENTQLQNEKLYLYYLQNGRDMYVDQELDINRLSDYDVDAIVPQSFLKDDSIDNKVLTRSDKNRGKSDNVPSEEVVKKMKNYWRQLLNAKLITQRKFDNLTKAERGGLSELDKAGFIKRQLVETRQITKHVAQILDSRMNTKYDENDKLIREVKVITLKSKLVSDFRKDFQFYKVREINNYHHAHDAYLNAVVGTALIKKYPKLESEFVYGDYKVYDVRKMIAKSEQEIGKATAKYFFYSNIMNFFKTEITLANGEIRKRPLIETNGETGEIVWDKGRDFATVRKVLSMPQVNIVKKTEVQTGGFSKESILPKRNSDKLIARKKDWDPKKYGGFDSPTVAYSVLVVAKVEKGKSKKLKSVKELLGITIMERSSFEKNPIDFLEAKGYKEVKKDLIIKLPKYSLFELENGRKRMLASAGELQKGNELALPSKYVNFLYLASHYEKLKGSPEDNEQKQLFVEQHKHYLDEIIEQISEFSKRVILADANLDKVLSAYNKHRDKPIREQAENIIHLFTLTNLGAPAAFKYFDTTIDRKRYTSTKEVLDATLIHQSITGLYETRIDLSQLGGDGGGSPKKKRKVGGGGSGGLEIEAAFLEQENTALETEVAELEQEVQRLENIVSQYETRYGPLGGGK

SEQ ID NO: 580 - protein, 784 aa, synthetic construct
MKGGGLEIRAAFLRRRNTALRTRVAELRQRVQRLRNIVSQYETRYGPLGGGGSGGKRTADGSEFESPKKKRKVLNIEDEYRLHETSKEPDVSLGSTWLSDFPQAWAETGGMGLAVRQAPLIIPLKATSTPVSIKQYPMSQEARLGIKPHIQRLLDQGILVPCQSPWNTPLLPVKKPGTNDYRPVQDLREVNKRVEDIHPTVPNPYNLLSGLPPSHQWYTVLDLKDAFFCLRLHPTSQPLFAFEWRDPEMGISGQLTWTRLPQGFKNSPTLFNEALHRDLADFRIQHPDLILLQYVDDLLLAATSELDCQQGTRALLQTLGNLGYRASAKKAQICQKQVKYLGYLLKEGQRWLTEARKETVMGQPTPKTPRQLREFLGKAGFCRLFIPGFAEMAAPLYPLTKPGTLFNWGPDQQKAYQEIKQALLTAPALGLPDLTKPFELFVDEKQGYAKGVLTQKLGPWRRPVAYLSKKLDPVAAGWPPCLRMVAAIAVLTKDAGKLTMGQPLVILAPHAVEALVKQPPDRWLSNARMTHYQALLLDTDRVQFGPVVALNPATLLPLPEEGLQHNCLDILAEAHGTRPDLTDQPLPDADHTWYTDGSSLLQEGQRKAGAAVTTETEVIWAKALPAGTSAQRAELIALTQALKMAEGKKLNVYTDSRYAFATAHIHGEIYRRRGWLTSEGKEIKNKDEILALLKALFLPKRLSIIHCPGHQKGHSAEARGNRMADQAARKAAITETPDTSTLLIENSSPSGGSKRTADGSEFEPKKKRKVGGSVSGWRLFKKIS

SEQ ID NO: 581 - protein, 2134 aa, synthetic construct
MKRTADGSEFESPKKKRKVDKKYSIGLDIGTNSVGWAVITDEYKVPSKKFKVLGNTDRHSIKKNLIGALLFDSGETAEATRLKRTARRRYTRRKNRICYLQEIFSNEMAKVDDSFFHRLEESFLVEEDKKHERHPIFGNIVDEVAYHEKYPTIYHLRKKLVDSTDKADLRLIYLALAHMIKFRGHFLIEGDLNPDNSDVDKLFIQLVQTYNQLFEENPINASGVDAKAILSARLSKSRRLENLIAQLPGEKKNGLFGNLIALSLGLTPNFKSNFDLAEDAKLQLSKDTYDDDLDNLLAQIGDQYADLFLAAKNLSDAILLSDILRVNTEITKAPLSASMIKRYDEHHQDLTLLKALVRQQLPEKYKEIFFDQSKNGYAGYIDGGASQEEFYKFIKPILEKMDGTEELLVKLNREDLLRKQRTFDNGSIPHQIHLGELHAILRRQEDFYPFLKDNREKIEKILTFRIPYYVGPLARGNSRFAWMTRKSEETITPWNFEEVVDKGASAQSFIERMTNFDKNLPNEKVLPKHSLLYEYFTVYNELTKVKYVTEGMRKPAFLSGEQKKAIVDLLFKTNRKVTVKQLKEDYFKKIECFDSVEISGVEDRFNASLGTYHDLLKIIKDKDFLDNEENEDILEDIVLTLTLFEDREMIEERLKTYAHLFDDKVMKQLKRRRYTGWGRLSRKLINGIRDKQSGKTILDFLKSDGFANRNFMQLIHDDSLTFKEDIQKAQVSGQGDSLHEHIANLAGSPAIKKGILQTVKVVDELVKVMGRHKPENIVIEMARENQTTQKGQKNSRERMKRIEEGIKELGSQILKEHPVENTQLQNEKLYLYYLQNGRDMYVDQELDINRLSDYDVDAIVPQSFLKDDSIDNKVLTRSDKNRGKSDNVPSEEVVKKMKNYWRQLLNAKLITQRKFDNLTKAERGGLSELDKAGFIKRQLVETRQITKHVAQILDSRMNTKYDENDKLIREVKVITLKSKLVSDFRKDFQFYKVREINNYHHAHDAYLNAVVGTALIKKYPKLESEFVYGDYKVYDVRKMIAKSEQEIGKATAKYFFYSNIMNFFKTEITLANGEIRKRPLIETNGETGEIVWDKGRDFATVRKVLSMPQVNIVKKTEVQTGGFSKESILPKRNSDKLIARKKDWDPKKYGGFDSPTVAYSVLVVAKVEKGKSKKLKSVKELLGITIMERSSFEKNPIDFLEAKGYKEVKKDLIIKLPKYSLFELENGRKRMLASAGELQKGNELALPSKYVNFLYLASHYEKLKGSPEDNEQKQLFVEQHKHYLDEIIEQISEFSKRVILADANLDKVLSAYNKHRDKPIREQAENIIHLFTLTNLGAPAAFKYFDTTIDRKRYTSTKEVLDATLIHQSITGLYETRIDLSQLGGDGGGSPKKKRKVGSGATNFSLLKQAGDVEENPGPKRTADGSEFESPKKKRKVLNIEDEYRLHETSKEPDVSLGSTWLSDFPQAWAETGGMGLAVRQAPLIIPLKATSTPVSIKQYPMSQEARLGIKPHIQRLLDQGILVPCQSPWNTPLLPVKKPGTNDYRPVQDLREVNKRVEDIHPTVPNPYNLLSGLPPSHQWYTVLDLKDAFFCLRLHPTSQPLFAFEWRDPEMGISGQLTWTRLPQGFKNSPTLFNEALHRDLADFRIQHPDLILLQYVDDLLLAATSELDCQQGTRALLQTLGNLGYRASAKKAQICQKQVKYLGYLLKEGQRWLTEARKETVMGQPTPKTPRQLREFLGKAGFCRLFIPGFAEMAAPLYPLTKPGTLFNWGPDQQKAYQEIKQALLTAPALGLPDLTKPFELFVDEKQGYAKGVLTQKLGPWRRPVAYLSKKLDPVAAGWPPCLRMVAAIAVLTKDAGKLTMGQPLVILAPHAVEALVKQPPDRWLSNARMTHYQALLLDTDRVQFGPVVALNPATLLPLPEEGLQHNCLDILAEAHGTRPDLTDQPLPDADHTWYTDGSSLLQEGQRKAGAAVTTETEVIWAKALPAGTSAQRAELIALTQALKMAEGKKLNVYTDSRYAFATAHIHGEIYRRRGWLTSEGKEIKNKDEILALLKALFLPKRLSIIHCPGHQKGHSAEARGNRMADQAARKAAITETPDTSTLLIENSSPSGGSKRTADGSEFEPKKKRKV

SEQ ID NO: 582 - protein, 2134 aa, synthetic construct
MKRTADGSEFESPKKKRKVLNIEDEYRLHETSKEPDVSLGSTWLSDFPQAWAETGGMGLAVRQAPLIIPLKATSTPVSIKQYPMSQEARLGIKPHIQRLLDQGILVPCQSPWNTPLLPVKKPGTNDYRPVQDLREVNKRVEDIHPTVPNPYNLLSGLPPSHQWYTVLDLKDAFFCLRLHPTSQPLFAFEWRDPEMGISGQLTWTRLPQGFKNSPTLFNEALHRDLADFRIQHPDLILLQYVDDLLLAATSELDCQQGTRALLQTLGNLGYRASAKKAQICQKQVKYLGYLLKEGQRWLTEARKETVMGQPTPKTPRQLREFLGKAGFCRLFIPGFAEMAAPLYPLTKPGTLFNWGPDQQKAYQEIKQALLTAPALGLPDLTKPFELFVDEKQGYAKGVLTQKLGPWRRPVAYLSKKLDPVAAGWPPCLRMVAAIAVLTKDAGKLTMGQPLVILAPHAVEALVKQPPDRWLSNARMTHYQALLLDTDRVQFGPVVALNPATLLPLPEEGLQHNCLDILAEAHGTRPDLTDQPLPDADHTWYTDGSSLLQEGQRKAGAAVTTETEVIWAKALPAGTSAQRAELIALTQALKMAEGKKLNVYTDSRYAFATAHIHGEIYRRRGWLTSEGKEIKNKDEILALLKALFLPKRLSIIHCPGHQKGHSAEARGNRMADQAARKAAITETPDTSTLLIENSSPSGGSKRTADGSEFEPKKKRKVGSGATNFSLLKQAGDVEENPGPKRTADGSEFESPKKKRKVDKKYSIGLDIGTNSVGWAVITDEYKVPSKKFKVLGNTDRHSIKKNLIGALLFDSGETAEATRLKRTARRRYTRRKNRICYLQEIFSNEMAKVDDSFFHRLEESFLVEEDKKHERHPIFGNIVDEVAYHEKYPTIYHLRKKLVDSTDKADLRLIYLALAHMIKFRGHFLIEGDLNPDNSDVDKLFIQLVQTYNQLFEENPINASGVDAKAILSARLSKSRRLENLIAQLPGEKKNGLFGNLIALSLGLTPNFKSNFDLAEDAKLQLSKDTYDDDLDNLLAQIGDQYADLFLAAKNLSDAILLSDILRVNTEITKAPLSASMIKRYDEHHQDLTLLKALVRQQLPEKYKEIFFDQSKNGYAGYIDGGASQEEFYKFIKPILEKMDGTEELLVKLNREDLLRKQRTFDNGSIPHQIHLGELHAILRRQEDFYPFLKDNREKIEKILTFRIPYYVGPLARGNSRFAWMTRKSEETITPWNFEEVVDKGASAQSFIERMTNFDKNLPNEKVLPKHSLLYEYFTVYNELTKVKYVTEGMRKPAFLSGEQKKAIVDLLFKTNRKVTVKQLKEDYFKKIECFDSVEISGVEDRFNASLGTYHDLLKIIKDKDFLDNEENEDILEDIVLTLTLFEDREMIEERLKTYAHLFDDKVMKQLKRRRYTGWGRLSRKLINGIRDKQSGKTILDFLKSDGFANRNFMQLIHDDSLTFKEDIQKAQVSGQGDSLHEHIANLAGSPAIKKGILQTVKVVDELVKVMGRHKPENIVIEMARENQTTQKGQKNSRERMKRIEEGIKELGSQILKEHPVENTQLQNEKLYLYYLQNGRDMYVDQELDINRLSDYDVDAIVPQSFLKDDSIDNKVLTRSDKNRGKSDNVPSEEVVKKMKNYWRQLLNAKLITQRKFDNLTKAERGGLSELDKAGFIKRQLVETRQITKHVAQILDSRMNTKYDENDKLIREVKVITLKSKLVSDFRKDFQFYKVREINNYHHAHDAYLNAVVGTALIKKYPKLESEFVYGDYKVYDVRKMIAKSEQEIGKATAKYFFYSNIMNFFKTEITLANGEIRKRPLIETNGETGEIVWDKGRDFATVRKVLSMPQVNIVKKTEVQTGGFSKESILPKRNSDKLIARKKDWDPKKYGGFDSPTVAYSVLVVAKVEKGKSKKLKSVKELLGITIMERSSFEKNPIDFLEAKGYKEVKKDLIIKLPKYSLFELENGRKRMLASAGELQKGNELALPSKYVNFLYLASHYEKLKGSPEDNEQKQLFVEQHKHYLDEIIEQISEFSKRVILADANLDKVLSAYNKHRDKPIREQAENIIHLFTLTNLGAPAAFKYFDTTIDRKRYTSTKEVLDATLIHQSITGLYETRIDLSQLGGDGGGSPKKKRKV

SEQ ID NO: 583 - protein, 15 aa, synthetic construct
KDKDKKSDGKDSQKK

SEQ ID NO: 584 - protein, 13 aa, synthetic construct
KDKKSDGKDSQKK

SEQ ID NO: 585 - protein, 7 aa, synthetic construct
QPRFAAA

SEQ ID NO: 586 - DNA, 21 bp, synthetic construct
  source 1..21: mol_type = other DNA
caaccgcggttcgcggccgct

SEQ ID NO: 587 - DNA, 145 bp, synthetic construct
  source 1..145: mol_type = other DNA
tatatatacttgctagggctgttttagagctagaaatagcaagttaaaataaggctagtccgttatcaacttgaaaaagtggcaccgagtcggtgcacgacggcggtctccgtcgtcaggatcatcctagcaagtatattttttt

SEQ ID NO: 588 - DNA, 145 bp, synthetic construct
  source 1..145: mol_type = other DNA
cttgtatgccccgagaagtggttttagagctagaaatagcaagttaaaataaggctagtccgttatcaacttgaaaaagtggcaccgagtcggtgcacgacggagaccgccgtcgtcgacaagccttctcggggcatattttttt

SEQ ID NO: 589 - DNA, 6653 bp, synthetic construct
  source 1..6653: mol_type = other DNA
aggaagctcagaataaacgctcaactttggccggatctgccaccatgaagagaaccgccgacggcagcgagttcgagagccccaagaagaagagaaaggtggacaagaagtacagcatcggcctggacatcggcaccaacagcgtgggctgggccgtgatcaccgacgagtacaaggtgcccagcaagaagttcaaggtgctgggcaacaccgacagacacagcatcaagaagaacctgatcggcgccctgctgttcgacagcggcgagaccgccgaggccaccagactgaagagaaccgccagaagaagatacaccagaagaaagaacagaatctgctacctgcaggagatcttcagcaacgagatggccaaggtggacgacagcttcttccacagactggaggagagcttcctggtggaggaggacaagaagcacgagagacaccccatcttcggcaacatcgtggacgaggtggcctaccacgagaagtaccccaccatctaccacctgagaaagaagctggtggacagcaccgacaaggccgacctgagactgatctacctggccctggcccacatgatcaagttcagaggccacttcctgatcgagggcgacctgaaccccgacaacagcgacgtggacaagctgttcatccagctggtgcagacctacaaccagctgttcgaggagaaccccatcaacgccagcggcgtggacgccaaggccatcctgagcgccagactgagcaagagcagaagactggagaacctgatcgcccagctgcccggcgagaagaagaacggcctgttcggcaacctgatcgccctgagcctgggcctgacccccaacttcaagagcaacttcgacctggccgaggacgccaagctgcagctgagcaaggacacctacgacgacgacctggacaacctgctggcccagatcggcgaccagtacgccgacctgttcctggccgccaagaacctgagcgacgccatcctgctgagcgacatcctgagagtgaacaccgagatcaccaaggcccccctgagcgccagcatgatcaagagatacgacgagcaccaccaggacctgaccctgctgaaggccctggtgagacagcagctgcccgagaagtacaaggagatcttcttcgaccagagcaagaacggctacgccggctacatcgacggcggcgccagccaggaggagttctacaagttcatcaagcccatcctggagaagatggacggcaccgaggagctgctggtgaagctgaacagagaggacctgctgagaaagcagagaaccttcgacaacggcagcatcccccaccagatccacctgggcgagctgcacgccatcctgagaagacaggaggacttctaccccttcctgaaggacaacagagagaagatcgagaagatcctgaccttcagaatcccctactacgtgggccccctggccagaggcaacagcagattcgcctggatgaccagaaagagcgaggagaccatcaccccctggaacttcgaggaggtggtggacaagggcgccagcgcccagagcttcatcgagagaatgaccaacttcgacaagaacctgcccaacgagaaggtgctgcccaagcacagcctgctgtacgagtacttcaccgtgtacaacgagctgaccaaggtgaagtacgtgaccgagggcatgagaaagcccgccttcctgagcggcgagcagaagaaggccatcgtggacctgctgttcaagaccaacagaaaggtgaccgtgaagcagctgaaggaggactacttcaagaagatcgagtgcttcgacagcgtggagatcagcggcgtggaggacagattcaacgccagcctgggcacctaccacgacctgctgaagatcatcaaggacaaggacttcctggacaacgaggagaacgaggacatcctggaggacatcgtgctgaccctgaccctgttcgaggacagagagatgatcgaggagagactgaagacctacgcccacctgttcgacgacaaggtgatgaagcagctgaagagaagaagatacaccggctggggcagactgagcagaaagctgatcaacggcatcagagacaagcagagcggcaagaccatcctggacttcctgaagagtgacggcttcgccaacagaaacttcatgcagctgatccacgacgacagcctgaccttcaaggaggacatccagaaggcccaggtgagcggccagggcgacagcctgcacgagcacatcgccaacctggccggcagccccgccatcaagaagggcatcctgcagaccgtgaaggtggtggacgagctggtgaaggtgatgggcagacacaagcccgagaacatcgtgatcgagatggccagagagaaccagaccacccagaagggccagaagaacagcagagagagaatgaagagaatcgaggagggcatcaaggagctgggcagccagatcctgaaggagcaccccgtggagaacacccagctgcagaacgagaagctgtacctgtactacctgcagaacggcagagacatgtacgtggaccaggagctggacatcaacagactgagcgactacgacgtggacgccatcgtgccccagagcttcctgaaggacgacagcatcgacaacaaggtgctgaccagaagcgacaagaacagaggcaagagcgacaacgtgcccagcgaggaggtggtgaagaagatgaagaactactggagacagctgctgaacgccaagctgatcacccagagaaagttcgacaacctgaccaaggccgagagaggcggcctgagcgagctggacaaggccggcttcatcaagagacagctggtggagaccagacagatcaccaagcacgtggcccagatcctggacagcagaatgaacaccaagtacgacgagaacgacaagctgatcagagaggtgaaggtgatcaccctgaagagtaagctggtgagcgacttcagaaaggacttccagttctacaaggtgagagagatcaacaactaccaccacgcccacgacgcctacctgaacgccgtggtgggcaccgccctgatcaagaagtaccccaagctggagagcgagttcgtgtacggcgactacaaggtgtacgacgtgagaaagatgatcgccaagagcgagcaggagatcggcaaggccaccgccaagtacttcttctacagcaacatcatgaacttcttcaagaccgagatcaccctggccaacggcgagatcagaaagagacccctgatcgagaccaacggcgagaccggcgagatcgtgtgggacaagggcagagacttcgccaccgtgagaaaggtgctgagcatgccccaggtgaacatcgtgaagaagaccgaggtgcagaccggcggcttcagcaaggagagcatcctgcccaagagaaacagcgacaagctgatcgccagaaagaaggactgggaccccaagaagtacggcggcttcgacagccccaccgtggcctacagcgtgctggtggtggccaaggtggagaagggcaagagcaagaagctgaagagtgtgaaggagctgctgggcatcaccatcatggagagaagcagcttcgagaagaaccccatcgacttcctggaggccaagggctacaaggaggtgaagaaggacctgatcatcaagctgcccaagtacagcctgttcgagctggagaacggcagaaagagaatgctggccagcgccggcgagctgcagaagggcaacgagctggccctgcccagcaagtacgtgaacttcctgtacctggccagccactacgagaagctgaagggcagccccgaggacaacgagcagaagcagctgttcgtggagcagcacaagcactacctggacgagatcatcgagcagatcagcgagttcagcaagagagtgatcctggccgacgccaacctggacaaggtgctgagcgcctacaacaagcacagagacaagcccatcagagagcaggccgagaacatcatccacctgttcaccctgaccaacctgggcgcccccgccgccttcaagtacttcgacaccaccatcgacagaaagagatacaccagcaccaaggaggtgctggacgccaccctgatccaccagagcatcaccggcctgtacgagaccagaatcgacctgagccagctgggcggcgacagcggcggcagcagcggcggcagcagcggcagcgagacccccggcaccagcgagagcgccacccccgagagcagcggcggcagcagcggcggcagcagcaccctgaacatcgaggacgagtacagactgcacgagaccagcaaggagcccgacgtgagcctgggcagcacctggctgagcgacttcccccaggcctgggccgagaccggcggcatgggcctggccgtgagacaggcccccctgatcatccccctgaaggccaccagcacccccgtgagcatcaagcagtaccccatgagccaggaggccagactgggcatcaagccccacatccagagactgctggaccagggcatcctggtgccctgccagagcccctggaacacccccctgctgcccgtgaagaagcccggcaccaacgactacagacccgtgcaggacctgagagaggtgaacaagagagtggaggacatccaccccaccgtgcccaacccctacaacctgctgagcggcctgccccccagccaccagtggtacaccgtgctggacctgaaggacgccttcttctgcctgagactgcaccccaccagccagcccctgttcgccttcgagtggagagaccccgagatgggcatcagcggccagctgacctggaccagactgccccagggcttcaagaacagccccaccctgttcaacgaggccctgcacagagacctggccgacttcagaatccagcaccccgacctgatcctgctgcagtacgtggacgacctgctgctggccgccaccagcgagctggactgccagcagggcaccagagccctgctgcagaccctgggcaacctgggctacagagccagcgccaagaaggcccagatctgccagaagcaggtgaagtacctgggctacctgctgaaggagggccagagatggctgaccgaggccagaaaggagaccgtgatgggccagcccacccccaagacccccagacagctgagagagttcctgggcaaggccggcttctgcagactgttcatccccggcttcgccgagatggccgcccccctgtaccccctgaccaagcccggcaccctgttcaactggggccccgaccagcagaaggcctaccaggagatcaagcaggccctgctgaccgcccccgccctgggcctgcccgacctgaccaagcccttcgagctgttcgtggacgagaagcagggctacgccaagggcgtgctgacccagaagctgggcccctggagaagacccgtggcctacctgagcaagaagctggaccccgtggccgccggctggcccccctgcctgagaatggtggccgccatcgccgtgctgaccaaggacgccggcaagctgaccatgggccagcccctggtgatcctggccccccacgccgtggaggccctggtgaagcagccccccgacagatggctgagcaacgccagaatgacccactaccaggccctgctgctggacaccgacagagtgcagttcggccccgtggtggccctgaaccccgccaccctgctgcccctgcccgaggagggcctgcagcacaactgcctggacatcctggccgaggcccacggcaccagacccgacctgaccgaccagcccctgcccgacgccgaccacacctggtacaccgacggcagcagcctgctgcaggagggccagagaaaggccggcgccgccgtgaccaccgagaccgaggtgatctgggccaaggccctgcccgccggcaccagcgcccagagagccgagctgatcgccctgacccaggccctgaagatggccgagggcaagaagctgaacgtgtacaccgacagcagatacgccttcgccaccgcccacatccacggcgagatctacagaagaagaggctggctgaccagcgagggcaaggagatcaagaacaaggacgagatcctggccctgctgaaggccctgttcctgcccaagagactgagcatcatccactgccccggccaccagaagggccacagcgccgaggccagaggcaacagaatggccgaccaggccgccagaaaggccgccatcaccgagacccccgacaccagcaccctgctgatcgagaacagcagccccagcggcggcagcaagagaaccgccgacggcagcgagttcgagcccaagaagaagagaaaggtgggcggcagcgtgagcggctggagactgttcaagaagatcagctgatgaaccagcctcaagaacacccgaatggagtctctaagctacataataccaacttacactttacaaaatgttgtcccccaaaatgtagccattcgtatctgctcctaataaaaagaaagtttcttcacattctaaaaaaaaaaaaaaaaaaaaaaaaaaaaaaaaaaaaaaaaaaaaaaaaaaaaaaaaaaaaaaaaaaaaaaaaaaaaaaaa

SEQ ID NO: 590 - DNA, 1790 bp, synthetic construct
  source 1..1790: mol_type = other DNA
aggaagctcagaataaacgctcaactttggccggatctgccaccatgcccaagaagaagagaaaggtgggcagcggcagagccctggtggtgatcagactgagcagagtgaccgacgccaccaccagccccgagagacagctggagagctgccagcagctgtgcgcccagagaggctgggacgtggtgggcgtggccgaggacctggacgtgagcggcgccgtggaccccttcgacagaaagagaagacccaacctggccagatggctggccttcgaggagcagcccttcgacgtgatcgtggcctacagagtggacagactgaccagaagcatcagacacctgcagcagctggtgcactgggccgaggaccacaagaagctggtggtgagcgccaccgaggcccacttcgacaccaccacccccttcgccgccgtggtgatcgccctgatgggcaccgtggcccagatggagctggaggccatcaaggagagaaacagaagcgccgcccacttcaacatcagagccggcaagtacagaggcagcctgcccccctggggctacctgcccaccagagtggacggcgagtggagactggtgcccgaccccgtgcagagagagagaatcctggaggtgtaccacagagtggtggacaaccacgagcccctgcacctggtggcccacgacctgaacagaagaggcgtgctgagccccaaggactacttcgcccagctgcagggcagagagccccagggcagagagtggagcgccaccgccctgaagagaagcatgatcagcgaggccatgctgggctacgccaccctgaacggcaagaccgtgagagacgacgacggcgcccccctggtgagagccgagcccatcctgaccagagagcagctggaggccctgagagccgagctggtgaagaccagcagagccaagcccgccgtgagcacccccagcctgctgctgagagtgctgttctgcgccgtgtgcggcgagcccgcctacaagttcgccggcggcggcagaaagcaccccagatacagatgcagaagcatgggcttccccaagcactgcggcaacggcaccgtggccatggccgagtgggacgccttctgcgaggagcaggtgctggacctgctgggcgacgccgagagactggagaaggtgtgggtggccggcagcgacagcgccgtggagctggccgaggtgaacgccgagctggtggacctgaccagcctgatcggcagccccgcctacagagccggcagcccccagagagaggccctggacgccagaatcgccgccctggccgccagacaggaggagctggagggcctggaggccagacccagcggctgggagtggagagagaccggccagagattcggcgactggtggagagagcaggacaccgccgccaagaacacctggctgagaagcatgaacgtgagactgaccttcgacgtgagaggcggcctgaccagaaccatcgacttcggcgacctgcaggagtacgagcagcacctgagactgggcagcgtggtggagagactgcacaccggcatgagctgatgaaccagcctcaagaacacccgaatggagtctctaagctacataataccaacttacactttacaaaatgttgtcccccaaaatgtagccattcgtatctgctcctaataaaaagaaagtttcttcacattctaaaaaaaaaaaaaaaaaaaaaaaaaaaaaaaaaaaaaaaaaaaaaaaaaaaaaaaaaaaaaaaaaaaaaaaaaaaaaaaa

SEQ ID NO: 591 - DNA, 1854 bp, synthetic construct
  source 1..1854: mol_type = other DNA
aggaagctcagaataaacgctcaactttggccggatctgccaccatgcccaagaagaagagaaaggtgtacccctacgacgtgcccgactacgccaaggacaagaaatccgatggcaaggacagccagaaaaaaggcagcagagccctggtggtgatcagactgagcagagtgaccgacgccaccaccagccccgagagacagctggagagctgccagcagctgtgcgcccagagaggctgggacgtggtgggcgtggccgaggacctggacgtgagcggcgccgtggaccccttcgacagaaagagaagacccaacctggccagatggctggccttcgaggagcagcccttcgacgtgatcgtggcctacagagtggacagactgaccagaagcatcagacacctgcagcagctggtgcactgggccgaggaccacaagaagctggtggtgagcgccaccgaggcccacttcgacaccaccacccccttcgccgccgtggtgatcgccctgatgggcaccgtggcccagatggagctggaggccatcaaggagagaaacagaagcgccgcccacttcaacatcagagccggcaagtacagaggcagcctgcccccctggggctacctgcccaccagagtggacggcgagtggagactggtgcccgaccccgtgcagagagagagaatcctggaggtgtaccacagagtggtggacaaccacgagcccctgcacctggtggcccacgacctgaacagaagaggcgtgctgagccccaaggactacttcgcccagctgcagggcagagagccccagggcagagagtggagcgccaccgccctgaagagaagcatgatcagcgaggccatgctgggctacgccaccctgaacggcaagaccgtgagagacgacgacggcgcccccctggtgagagccgagcccatcctgaccagagagcagctggaggccctgagagccgagctggtgaagaccagcagagccaagcccgccgtgagcacccccagcctgctgctgagagtgctgttctgcgccgtgtgcggcgagcccgcctacaagttcgccggcggcggcagaaagcaccccagatacagatgcagaagcatgggcttccccaagcactgcggcaacggcaccgtggccatggccgagtgggacgccttctgcgaggagcaggtgctggacctgctgggcgacgccgagagactggagaaggtgtgggtggccggcagcgacagcgccgtggagctggccgaggtgaacgccgagctggtggacctgaccagcctgatcggcagccccgcctacagagccggcagcccccagagagaggccctggacgccagaatcgccgccctggccgccagacaggaggagctggagggcctggaggccagacccagcggctgggagtggagagagaccggccagagattcggcgactggtggagagagcaggacaccgccgccaagaacacctggctgagaagcatgaacgtgagactgaccttcgacgtgagaggcggcctgaccagaaccatcgacttcggcgacctgcaggagtacgagcagcacctgagactgggcagcgtggtggagagactgcacaccggcatgagctgatgaaccagcctcaagaacacccgaatggagtctctaagctacataataccaacttacactttacaaaatgttgtcccccaaaatgtagccattcgtatctgctcctaataaaaagaaagtttcttcacattctaaaaaaaaaaaaaaaaaaaaaaaaaaaaaaaaaaaaaaaaaaaaaaaaaaaaaaaaaaaaaaaaaaaaaaaaaaaaaaaat

SEQ ID NO: 592 - DNA, 4870 bp, synthetic construct
  source 1..4870: mol_type = other DNA
cgtatcacgaggccctttgtcacagcttgtctgtaagcggatgccgggagcagacaagcccgtcagggcgcgtcagcgggtgttggcgggtgtcggggctggcttaactatgcggcatcagagcagattgtactgagagtgcaccatatgcggtgtgaaataccgcacagatgcgtaaggagaaaataccgcatcaggcgccattcgccattcaggctgcgcaactgttgggaagggcgatcggtgcgggcctcttcgctattacgccagctggcgaaagggggatgtgctgcaaggcgattaagttgggtaacgccagggttttcccagtcacgacgttgtaaaacgacggccagtgaattcgagctctcgctattacttggccactccctctctgcgcgctcgctcgctcactgaggccgggcgaccaaaggtcgcccgacgcccgggctttgcccgggcggcctcagtgagcgagcgagcgcgcagagagggagtggccaactccatcactaggggttcctcactgcccgcagatctactagtcgtgtggggaccaggttttgcctttagttttgcacacactgtagttcatcaacaaaaaaatatacttgctaggatgatcctgacgacggagaccgccgtcgtgcaccgactcggtgccactttttcaagttgataacggactagccttattttaacttgctatttctagctctaaaacagccctagcaagtatatatacggtgtttcgtcctttccacaagatatataaagccaagaaatcgaaatactttcaagttacggtaagcatatgatagtccattttaaaacataattttaaaactgcaaactacccaagaaattattactttctacgtcacgtattttgtactaatatctttgtgtttacagtcaaattaattctaattatctctctaacagccttgtatcgtatatgcaaatatgaaggaatcatgggaaataggccctccctgtctcaaaaaaaagaaattggcagaattaagtaagttgatgtttgccaaaaaaatatgccccgagaaggcttgtcgacgacggcggtctccgtcgtgcaccgactcggtgccactttttcaagttgataacggactagccttattttaacttgctatttctagctctaaaaccacttctcggggcatacaagcggtgtttcgtcctttccacaagatatataaagccaagaaatcgaaatactttcaagttacggtaagcatatgatagtccattttaaaacataattttaaaactgcaaactacccaagaaattattactttctacgtcacgtattttgtactaatatctttgtgtttacagtcaaattaattctaattatctctctaacagccttgtatcgtatatgcaaatatgaaggaatcatgggaaataggccctctttatggagatgctcatggcctcattgaagccccactacagctctggtagcggtaaccatgcgtatttgacacacgaaggaactagggaaaaggcattaggtggtttgtctggtcaaccaccgcggtctcagtggtgtacggtacaaacccaccaccatgggcaacagcttcagcaccagcgccttcggccctgtggccttttctctgggcctcctgctcgtgctgcctgccgcttttccagctcctgtgttcaccctggaagatttcgtgggagattggcggcagaccgccggctacaacctggaccaagtgctggaacagggcggagtgtccagcctgtttcagaacctgggcgtttccgtgacccctatccagcggatcgtgctgagcggcgagaacggcctgaaaatcgacatccatgtgattatcccctacgagggcctgagcggagatcagatgggccagatcgagaaaatcttcaaggtggtgtaccccgtcgacgaccaccacttcaaggtgatcctgcactacggcaccctggtgatcgacggcgttacccctaacatgatcgactacttcggcagaccctatgagggaattgccgtgttcgacggcaagaaaatcaccgtgaccggcacactgtggaacggcaacaagatcatcgatgagcgcctgatcaacccagacggcagcctgctgttcagagtgacaatcaatggcgtgacaggctggagactttgtgaaagaatcctggcctgagtttggacaaaccacaactagaatctgtgccttctagttgccagccatctgttgtttgcccctcccccgtgccttccttgaccctggaaggtgccactcccactgtcctttcctaataaaatgagaaaattgcatcgcattgtctgagtaggtgtcattctattctggggggtggggtggggcaggacagcaagggggaggattgggaagacaatagcaggcatgctggggatgcggtgggctctatgggtctacaactagtagatctcactgcccgcccactccctctctgcgcgctcgctcgctcactgaggccgggcgaccaaaggtcgcccgacgcccgggctttgcccgggcggcctcagtgagcgagcgagcgcgcagagagggatgcattaatgggatcctctagagtcgacctgcaggcatgcaagcttggcgtaatcatggtcatagctgtttcctgtgtgaaattgttatccgctcacaattccacacaacatacgagccggaagcataaagtgtaaagcctggggtgcctaatgagtgagctaactcacattaattgcgttgcgctcactgcccgctttccagtcgggaaacctgtcgtgccagctgcattaatgaatcggccaacgcgcggggagaggcggtttgcgtattgggcgctcttacgcttcctcgctcactgactcgctgcgctcggtcgttcggctgcggcgagcggtatcagctcactcaaaggcggtaatacggttatccacagaatcaggggataacgcaggaaagaacatgtgagcaaaaggccagcaaaaggccaggaaccgtaaaaaggccgcgttgctggcgtttttccataggctccgcccccctgacgagcatcacaaaaatcgacgctcaagtcagaggtggcgaaacccgacaggactataaagataccaggcgtttccccctggaagctccctcgtgcgctctcctgttccgaccctgccgcttaccggatacctgtccgcctttctcccttcgggaagcgtggcgctttctcatagctcacgctgtaggtatctcagttcggtgtaggtcgttcgctccaagctgggctgtgtgcacgaaccccccgttcagcccgaccgctgcgccttatccggtaactatcgtcttgagtccaacccggtaagacacgacttatcgccactggcagcagccactggtaacaggattagcagagcgaggtatgtaggcggtgctacagagttcttgaagtggtggcctaactacggctacactagaaggacagtatttggtatctgcgctctgctgaagccagttaccttcggaaaaagagttggtagctcttgatccggcaaacaaaccaccgctggtagcggtggtttttttgtttgcaagcagcagattacgcgcagaaaaaaaggatctcaagaagatcctttgatcttttctacggggtctgacgctcagtggaacgaaaactcacgttaagggattttggtcatgagattatcaaaaaggatcttcacctagatccttttaaattaaaaatgaagttttaaatcaatctaaagtatatatgagtaaacttggtctgacagttaccaatgcttaatcagtgaggcacctatctcagcgatctgtctatttcgttcatccatagttgcctgactccccgtcgtgtagataactacgatacgggagggcttaccatctggccccagtgctgcaatgataccgcgagacccacgctcaccggctccagatttatcagcaataaaccagccagccggaagggccgagcgcagaagtggtcctgcaactttatccgcctccatccagtctattaattgttgccgggaagctagagtaagtagttcgccagttaatagtttgcgcaacgttgttgccattgctacaggcatcgtggtgtcacgctcgtcgtttggtatggcttcattcagctccggttcccaacgatcaaggcgagttacatgatcccccatgttgtgcaaaaaagcggttagctccttcggtcctccgatcgttgtcagaagtaagttggccgcagtgttatcactcatggttatggcagcactgcataattctcttactgtcatgccatccgtaagatgcttttctgtgactggtgagtactcaaccaagtcattctgagaatagtgtatgcggcgaccgagttgctcttgcccggcgtcaatacgggataataccgcgccacatagcagaactttaaaagtgctcatcattggaaaacgttcttcggggcgaaaactctcaaggatcttaccgctgttgagatccagttcgatgtaacccactcgtgcacccaactgatcttcagcatcttttactttcaccagcgtttctgggtgagcaaaaacaggaaggcaaaatgccgcaaaaaagggaataagggcgacacggaaatgttgaatactcatactcttcctttttcaatattattgaagcatttatcagggttattgtctcatgagcggatacatatttgaatgtatttagaaaaataaacaaataggggttccgcgcacatttccccgaaaagtgccacctgacgtctaagaaaccattattatcatgacattaacctataaaaataggcgtatcacgaggccctttcgtc

SEQ ID NO: 593 - DNA, 1794 bp, synthetic construct
  source 1..1794: mol_type = other DNA
ccccaactggggtaacctttgggctccccgggcgcgactataagctgcgagcaacttcacttgggtatgccggcggtagcgcttaccgttcgtataatgtatgctatacgaagttatccgaagccgctagcggtggtttgtctggtcaaccaccgcggtctcagtggtgtacggtacaaacccagctaccggtcgtaggtcagtgaagagaagaacaaaaagcagcatattacagttagttgtcttcatcaatcttgaaatatgttgtgtcctttttctctccctgtttccacagttatgggcaacagcttcagcaccagcgccttcggccctgtggccttttctctgggcctcctgctcgtgctgcctgccgcttttccagctcctgtgttcaccctggaagatttcgtgggagattggcggcagaccgccggctacaacctggaccaagtgctggaacagggcggagtgtccagcctgtttcagaacctgggcgtctccgtgacccctatccagcggatcgtgctgagcggcgagaacggcctgaaaatcgacatccatgtgattatcccctacgagggcctgagcggagatcagatgggccagatcgagaaaatcttcaaggtggtgtaccccgtcgacgaccaccacttcaaggtgatcctgcactacggcaccctggtgatcgacggcgttacccctaacatgatcgactacttcggcagaccctatgagggaattgccgtgttcgacggcaagaaaatcaccgtgaccggcacactgtggaacggcaacaagatcatcgatgagcgcctgatcaacccagacggcagcctgctgttcagagtgacaatcaatggcgtgacaggctggagactttgtgaaagaatcctggccggttctggcggcgccaccaacttcagcctgctgaagcaggccggcgacgtggaagagaatcccggacctgagggcagaggatctctgctgacatgcggcgatgtggaagagaatcctggacctgctatgaaaatcgagtgcagaattacaggcacactgaacggagttgaattcgagctggtcggcggaggcgagggcacacctgagcagggcagaatgaccaacaagatgaaaagcaccaagggcgccctgaccttttctccttacctgctgagccacgtgatgggctatggcttctaccacttcggcacctaccccagcggctatgaaaaccccttcctgcatgctatcaacaacggaggctacaccaataccagaatcgagaagtacgaggacggcggcgtgctgcacgtgtccttcagctacagatacgaggccggcagagtgatcggcgacttcaaggtggtgggcacaggatttccagaagatagcgtgatcttcaccgacaagatcatccggagcaacgccaccgtggaacacctgcaccccatgggcgataatgtgctggtgggctcctttgctagaacattctccctgcgggacggcggatactacagcttcgtggtcgacagccacatgcacttcaagtctgccatccacccttctatcctgcagaacggcggacctatgttcgccttccggcgggtggaggaactccacagcaacaccgagctgggcatcgtggaataccagcacgcctttaagacccctatcgccttcgccagaagcagagccaggtgagagctcgatgagtttggacaaaccacaactagaatgcagtgaaaaaaatgctttatttgtgaaatttgtgatgctattgctttatttgtgggcccg

SEQ ID NO: 594 - DNA, 5156 bp, synthetic construct
  source 1..5156: mol_type = other DNA
tggtttttttgtttgcaagcagcagattacgcgcagaaaaaaaggatctcaagaagatcctttgatcttttctacggggtctgacgctcagtggaacgaaaactcacgttaagggattttggtcatgagattatcaaaaaggatcttcacctagatccttttaaattaaaaatgaagttttaaatcaagcccaatctgaataatgttacaaccaattaaccaattctgattagaaaaactcatcgagcatcaaatgaaactgcaatttattcatatcaggattatcaataccatatttttgaaaaagccgtttctgtaatgaaggagaaaactcaccgaggcagttccataggatggcaagatcctggtatcggtctgcgattccgactcgtccaacatcaatacaacctattaatttcccctcgtcaaaaataaggttatcaagtgagaaatcaccatgagtgacgactgaatccggtgagaatggcaaaagtttatgcatttctttccagacttgttcaacaggccagccattacgctcgtcatcaaaatcactcgcatcaaccaaaccgttattcattcgtgattgcgcctgagcgagacgaaatacgcgatcgctgttaaaaggacaattacaaacaggaatcgaatgcaaccggcgcaggaacactgccagcgcatcaacaatattttcacctgaatcaggatattcttctaatacctggaatgctgtttttccggggatcgcagtggtgagtaaccatgcatcatcaggagtacggataaaatgcttgatggtcggaagaggcataaattccgtcagccagtttagtctgaccatctcatctgtaacatcattggcaacgctacctttgccatgtttcagaaacaactctggcgcatcgggcttcccatacaagcgatagattgtcgcacctgattgcccgacattatcgcgagcccatttatacccatataaatcagcatccatgttggaatttaatcgcggcctcgacgtttcccgttgaatatggctcataacaccccttgtattactgtttatgtaagcagacagttttattgttcatgatgatatatttttatcttgtgcaatgtaacatcagagattttgagacacgggccagagctgcatcgcgcgtttcggtgatgacggtgaaaacctctgacacatgcagctcccggagacggtcacagcttgtctgtaagcggatgccgggagcagacaagcccgtcagggcgcgtcagcgggtgttggcgggtgtcggggctggcttaactatgcggcatcagagcagattgtactgagagtgcaccatatgcggtgtgaaataccgcacagatgcgtaaggagaaaataccgcatcaggcgccattcgccattcaggctgcgcaactgttgggaagggcgatcggtgcgggcctcttcgctattacgccagctggcgaaagggggatgtgctgcaaggcgattaagttgggtaacgccagggttttcccagtcacacgttgtaaaacgacggccagagtggtttgtctggtcaaccaccgcggtctcagtggtgtacggtacaaacccagaattcgagctcggctccggtgcccgtcagtgggcagagcgcacatcgcccacagtccccgagaagttggggggaggggtcggcaattgaaccggtgcctagagaaggtggcgcggggtaaactgggaaagtgatgtcgtgtactggctccgcctttttcccgagggtgggggagaaccgtatataagtgcagtagtcgccgtgaacgttctttttcgcaacgggtttgccgccagaacacaggtaagtgccgtgtgtggttcccgcgggcctggcctctttacgggttatggcccttgcgtgccttgaattacttccacctggctgcagtacgtgattcttgatcccgagcttcgggttggaagtgggtgggagagttcgaggccttgcgcttaaggagccccttcgcctcgtgcttgagttgaggcctggcctgggcgctggggccgccgcgtgcgaatctggtggcaccttcgcgcctgtctcgctgctttcgataagtctctagccatttaaaatttttgatgacctgctgcgacgctttttttctggcaagatagtcttgtaaatgcgggccaagatctgcacactggtatttcggtttttggggccgcgggcggcgacggggcccgtgcgtcccagcgcacatgttcggcgaggcggggcctgcgagcgcggccaccgagaatcggacgggggtagtctcaagctggccggcctgctctggtgcctggcctcgcgccgccgtgtatcgccccgccctgggcggcaaggctggcccggtcggcaccagttgcgtgagcggaaagatggccgcttcccggccctgctgcagggagctcaaaatggaggacgcggcgctcgggagagcgggcgggtgagtcacccacacaaaggaaaagggcctttccgtcctcagccgtcgcttcatgtgactccacggagtaccgggcgccgtccaggcacctcgattagttctcgagcttttggagtacgtcgtctttaggttggggggaggggttttatgcgatggagtttccccacactgagtgggtggagactgaagttaggccagcttggcacttgatgtaattctccttggaatttgccctttttgagtttggatcttggttcattctcaagcctcagacagtggttcaaagtttttttcttccatttcaggtgtcgtgaggatccgccaccatggtcagcaagggcgaggaactgttcaccggggtggtgcccatcctggtcgagctggacggcgacgtaaacggccacaagttcagcgtgtccggcgagggcgagggcgatgccacctacggcaagctgaccctgaagttcatctgtaccaccggcaagctgcccgtgccctggcccaccctcgtgaccaccctgacctacggcgtgcaatgcttcagccgctaccccgaccacatgaagcagcacgacttcttcaagtccgccatgcccgaaggctacgtccaggagcgcaccatcttcttcaaggacgacggcaactacaagacccgcgccgaggtgaagttcgagggcgacaccctggtgaaccgcatcgagctgaagggcatcgacttcaaggaggacggcaacatcctggggcacaagctggagtacaactacaacagccacaacgtctatatcatggccgacaagcagaagaacggcatcaaggtgaacttcaagatccgccacaacatcgaggacggcagcgtgcaactcgccgaccactaccagcagaacacccccatcggcgacggccccgtgctgctgcccgacaaccactacctgagcacccagtccgccctgagcaaagaccccaacgagaagcgcgatcacatggtcctgctggagttcgtgaccgccgccgggatcactctcggcatggacgagctgtacaagggaagcggagctactaacttcagcctgctgaagcaggctggcgacgtggaggagaaccctggacctatggttacagagtataaacctacggtccgactcgcaacgagagatgatgtgccccgcgcggttcgcacacttgcggcagcttttgctgactatcccgcgactcggcatacggtcgatccggaccgacatatcgagcgcgtaacagaacttcaagaactctttctcacaagagttggacttgacattgggaaggtatgggtagccgatgacggtgcggctgttgcggtatggacaacacccgaaagtgtagaggcaggcgcggtcttcgctgagatcggtccgcggatggccgaactgtccggttcacgattggcggcgcaacaacaaatggagggtctcctcgctccacatagacctaaagagccagcgtggtttcttgccacagtgggcgttagccccgaccaccagggtaagggacttgggagcgcagttgtattgccaggagttgaagcggccgagagggcgggcgtaccagcgttccttgagacatctgcgccccgcaacctgcccttttacgaacgcctcggattcaccgtcaccgccgatgtagaggtcccagaaggtcccagaacctggtgcatgacccggaaacccggggcgtgagtttaaacccgcaagcttgcctcgactgtgccttctagttgccagccatctgttgtttgcccctcccccgtgccttccttgaccctggaaggtgccactcccactgtcctttcctaataaaatgagaaaattgcatcgcattgtctgagtaggtgtcattctattctggggggtggggtggggcaggacagcaagggggaggattgggaagacaatagcaggcatgctggggatgcggtgggctctatggtcttccgcttcctcgctcactgactcgctgcgctcggtcgttcggctgcggcgagcggtatcagctcactcaaaggcggtaatacggttatccacagaatcaggggataacgcaggaaagaacatgtgagcaaaaggccagcaaaaggccaggaaccgtaaaaaggccgcgttgctggcgtttttccataggctccgcccccctgacgagcatcacaaaaatcgacgctcaagtcagaggtggcgaaacccgacaggactataaagataccaggcgtttccccctggaagctccctcgtgcgctctcctgttccgaccctgccgcttaccggatacctgtccgcctttctcccttcgggaagcgtggcgctttctcatagctcacgctgtaggtatctcagttcggtgtaggtcgttcgctccaagctgggctgtgtgcacgaaccccccgttcagcccgaccgctgcgccttatccggtaactatcgtcttgagtccaacccggtaagacacgacttatcgccactggcagcagccactggtaacaggattagcagagcgaggtatgtaggcggtgctacagagttcttgaagtggtggcctaactacggctacactagaagaacagtatttggtatctgcgctctgctgaagccagttaccttcggaaaaagagttggtagctcttgatccggcaaacaaaccaccgctggtagcgg

SEQ ID NO: 595 - RNA, 152 nt, synthetic construct
  source 1..152: mol_type = other RNA
  modified_base order(1..3,29..40,69..96,149..152): mod_base = OTHER; note = 2-Prime-O-methyl ribonucleotides
  modified_base order(1..4,149..152): mod_base = OTHER; note = Phosphorothioate linkages
tcctgaagctgacagcattcgttttagagctagaaatagcaagttaaaataaggctagtccgttatcaacttgaaaaagtggcaccgagtcggtgcatgatcctgacgacggagaccgccgtcgtcgacaagccctgctgtcagcttctttt

SEQ ID NO: 596 - RNA, 151 nt, synthetic construct
  source 1..151: mol_type = other RNA
  modified_base order(1..4,148..151): mod_base = OTHER; note = Phosphorothioate linkages
  modified_base order(1..3,29..40,69..96,148..151): mod_base = OTHER; note = 2-Prime-O-methyl ribonucleotides
gaggaaggaccagagcgggagttttagagctagaaatagcaagttaaaataaggctagtccgttatcaacttgaaaaagtggcaccgagtcggtgcggcttgtcgacgacggcggtctccgtcgtcaggatcatcgctctggtcctttttt

SEQ ID NO: 597 - RNA, 138 nt, synthetic construct
  source 1..138: mol_type = other RNA
  modified_base order(1..3,136..138): mod_base = OTHER; note = 2-Prime-O-methyl ribonucleotides
  modified_base order(1..4,135..138): mod_base = OTHER; note = Phosphorothioate linkages
tcctgaagctgacagcattcgttttagagctagaaatagcaagttaaaataaggctagtccgttatcaacttgaaaaagtggcaccgagtcggtgcacgacggagaccgccgtcgtcgacaagcctgctgtcagcttc

SEQ ID NO: 598 - RNA, 138 nt, synthetic construct
  source 1..138: mol_type = other RNA
  modified_base order(1..4,135..138): mod_base = OTHER; note = Phosphorothioate linkages
  modified_base order(1..3,136..138): mod_base = OTHER; note = 2-Prime-O-methyl ribonucleotides
gaggaaggaccagagcgggagttttagagctagaaatagcaagttaaaataaggctagtccgttatcaacttgaaaaagtggcaccgagtcggtgcacgacggcggtctccgtcgtcaggatcatcgctctggtcctt

SEQ ID NO: 599 - RNA, 156 nt, synthetic construct
  source 1..156: mol_type = other RNA
  modified_base order(1..3,29..40,69..96,153..156): mod_base = OTHER; note = 2-Prime-O-methyl ribonucleotides
  modified_base order(1..4,153..156): mod_base = OTHER; note = Phosphorothioate linkages
tcaactgcgaccagttcagcgttttagagctagaaatagcaagttaaaataaggctagtccgttatcaacttgaaaaagtggcaccgagtcggtgcatgatcctgacgacggagcccgccgtcgtcgacaagcccattagaactggtcgcagtttt

SEQ ID NO: 600 - RNA, 151 nt, synthetic construct
  source 1..151: mol_type = other RNA
  modified_base order(1..4,148..151): mod_base = OTHER; note = Phosphorothioate linkages
  modified_base order(1..3,29..40,69..96,148..151): mod_base = OTHER; note = 2-Prime-O-methyl ribonucleotides
gatattggcataagcctcccgttttagagctagaaatagcaagttaaaataaggctagtccgttatcaacttgaaaaagtggcaccgagtcggtgcggcttgtcgacgacggcgggctccgtcgtcaggatcataggcttatgccaatttt

SEQ ID NO: 601 - RNA, 152 nt, synthetic construct
  source 1..152: mol_type = other RNA
  modified_base order(1..3,29..40,69..96,149..152): mod_base = OTHER; note = 2-Prime-O-methyl ribonucleotides
  modified_base order(1..4,149..152): mod_base = OTHER; note = Phosphorothioate linkages
ggggccactagggacaggatgttttagagctagaaatagcaagttaaaataaggctagtccgttatcaacttgaaaaagtggcaccgagtcggtgcatgatcctgacgacggaggtcgccgtcgtcgacaagcccctgtccctagtggtttt

SEQ ID NO: 602 - RNA, 151 nt, synthetic construct
  source 1..151: mol_type = other RNA
  modified_base order(1..4,148..151): mod_base = OTHER; note = Phosphorothioate linkages
  modified_base order(1..3,29..40,69..96,148..151): mod_base = OTHER; note = 2-Prime-O-methyl ribonucleotides
agacccaatatcaggagactgttttagagctagaaatagcaagttaaaataaggctagtccgttatcaacttgaaaaagtggcaccgagtcggtgcggcttgtcgacgacggcgacctccgtcgtcaggatcatctcctgatattggtttt

SEQ ID NO: 603 - RNA, 147 nt, synthetic construct
  source 1..147: mol_type = other RNA
  modified_base order(1..4,144..147): mod_base = OTHER; note = Phosphorothioate linkages
  modified_base order(1..3,145..147): mod_base = OTHER; note = 2-Prime-O-methyl ribonucleotides
catctttgccaacgtcagtggttttagagctagaaatagcaagttaaaataaggctagtccgttatcaacttgaaaaagtggcaccgagtcggtgcatgatcctgacgacggagaccgccgtcgtcgacaagcctgacgttggcaaa

SEQ ID NO: 604 - RNA, 147 nt, synthetic construct
  source 1..147: mol_type = other RNA
  modified_base order(1..3,145..147): mod_base = OTHER; note = 2-Prime-O-methyl ribonucleotides
  modified_base order(1..4,144..147): mod_base = OTHER; note = Phosphorothioate linkages
caaccacccacaagtcattggttttagagctagaaatagcaagttaaaataaggctagtccgttatcaacttgaaaaagtggcaccgagtcggtgcggcttgtcgacgacggcggtctccgtcgtcaggatcattgacttgtgggtg

SEQ ID NO: 605 - RNA, 138 nt, synthetic construct
  source 1..138: mol_type = other RNA
  modified_base order(1..4,135..138): mod_base = OTHER; note = Phosphorothioate linkages
  modified_base order(1..3,136..138): mod_base = OTHER; note = 2-Prime-O-methyl ribonucleotides
catctttgccaacgtcagtggttttagagctagaaatagcaagttaaaataaggctagtccgttatcaacttgaaaaagtggcaccgagtcggtgcacgacggagaccgccgtcgtcgacaagcctgacgttggcaaa

SEQ ID NO: 606 - RNA, 138 nt, synthetic construct
  source 1..138: mol_type = other RNA
  modified_base order(1..3,136..138): mod_base = OTHER; note = 2-Prime-O-methyl ribonucleotides
  modified_base order(1..4,135..138): mod_base = OTHER; note = Phosphorothioate linkages
caaccacccacaagtcattggttttagagctagaaatagcaagttaaaataaggctagtccgttatcaacttgaaaaagtggcaccgagtcggtgcacgacggcggtctccgtcgtcaggatcattgacttgtgggtg

SEQ ID NO: 607 - RNA, 152 nt, synthetic construct
  source 1..152: mol_type = other RNA
  modified_base order(1..3,29..40,69..96,149..152): mod_base = OTHER; note = 2-Prime-O-methyl ribonucleotides
  modified_base order(1..4,149..152): mod_base = OTHER; note = Phosphorothioate linkages
tggcatctggactccagcctgttttagagctagaaatagcaagttaaaataaggctagtccgttatcaacttgaaaaagtggcaccgagtcggtgcatgatcctgacgacggagagcgccgtcgtcgacaagcccctggagtccagattttt

SEQ ID NO: 608 - RNA, 151 nt, synthetic construct
  source 1..151: mol_type = other RNA
  modified_base order(1..4,148..151): mod_base = OTHER; note = Phosphorothioate linkages
  modified_base order(1..3,29..40,69..96,148..151): mod_base = OTHER; note = 2-Prime-O-methyl ribonucleotides
agagtctctcagctggtacagttttagagctagaaatagcaagttaaaataaggctagtccgttatcaacttgaaaaagtggcaccgagtcggtgcggcttgtcgacgacggcgctctccgtcgtcaggatcataccagctgagagatttt

SEQ ID NO: 609 - RNA, 138 nt, synthetic construct
  source 1..138: mol_type = other RNA
  modified_base order(1..3,136..138): mod_base = OTHER; note = 2-Prime-O-methyl ribonucleotides
  modified_base order(1..4,135..138): mod_base = OTHER; note = Phosphorothioate linkages
tggcatctggactccagcctgttttagagctagaaatagcaagttaaaataaggctagtccgttatcaacttgaaaaagtggcaccgagtcggtgcacgacggagaccgccgtcgtcgacaagccctggagtccagat

SEQ ID NO: 610 - RNA, 138 nt, synthetic construct
  source 1..138: mol_type = other RNA
  modified_base order(1..4,135..138): mod_base = OTHER; note = Phosphorothioate linkages
  modified_base order(1..3,136..138): mod_base = OTHER; note = 2-Prime-O-methyl ribonucleotides
agagtctctcagctggtacagttttagagctagaaatagcaagttaaaataaggctagtccgttatcaacttgaaaaagtggcaccgagtcggtgcacgacggcggtctccgtcgtcaggatcataccagctgagaga

SEQ ID NO: 611 - RNA, 142 nt, synthetic construct
  source 1..142: mol_type = other RNA
cttgtatgccccgagaagtggttttagagctagaaatagcaagttaaaataaggctagtccgttatcaacttgaaaaagtggcaccgagtcggtgcacgacggagaccgccgtcgtcgacaagccttctcggggcatatttt

SEQ ID NO: 612 - RNA, 142 nt, synthetic construct
  source 1..142: mol_type = other RNA
tatatatacttgctagggctgttttagagctagaaatagcaagttaaaataaggctagtccgttatcaacttgaaaaagtggcaccgagtcggtgcacgacggcggtctccgtcgtcaggatcatcctagcaagtatatttt

SEQ ID NO: 613 - RNA, 138 nt, synthetic construct
  source 1..138: mol_type = other RNA
ttggcttctaaaaggagtttgttttagagctagaaatagcaagttaaaataaggctagtccgttatcaacttgaaaaagtggcaccgagtcggtgcacgacggagaccgccgtcgtcgacaagccctccttttagaag

SEQ ID NO: 614 - RNA, 138 nt, synthetic construct
  source 1..138: mol_type = other RNA
actgttgcaataatacctaagttttagagctagaaatagcaagttaaaataaggctagtccgttatcaacttgaaaaagtggcaccgagtcggtgcacgacggcggtctccgtcgtcaggatcatggtattattgcaa

SEQ ID NO: 615 - protein, 2131 aa, synthetic construct
MKRTADGSEFESPKKKRKVDKKYSIGLDIGTNSVGWAVITDEYKVPSKKFKVLGNTDRHSIKKNLIGALLFDSGETAEATRLKRTARRRYTRRKNRICYLQEIFSNEMAKVDDSFFHRLEESFLVEEDKKHERHPIFGNIVDEVAYHEKYPTIYHLRKKLVDSTDKADLRLIYLALAHMIKFRGHFLIEGDLNPDNSDVDKLFIQLVQTYNQLFEENPINASGVDAKAILSARLSKSRRLENLIAQLPGEKKNGLFGNLIALSLGLTPNFKSNFDLAEDAKLQLSKDTYDDDLDNLLAQIGDQYADLFLAAKNLSDAILLSDILRVNTEITKAPLSASMIKRYDEHHQDLTLLKALVRQQLPEKYKEIFFDQSKNGYAGYIDGGASQEEFYKFIKPILEKMDGTEELLVKLNREDLLRKQRTFDNGSIPHQIHLGELHAILRRQEDFYPFLKDNREKIEKILTFRIPYYVGPLARGNSRFAWMTRKSEETITPWNFEEVVDKGASAQSFIERMTNFDKNLPNEKVLPKHSLLYEYFTVYNELTKVKYVTEGMRKPAFLSGEQKKAIVDLLFKTNRKVTVKQLKEDYFKKIECFDSVEISGVEDRFNASLGTYHDLLKIIKDKDFLDNEENEDILEDIVLTLTLFEDREMIEERLKTYAHLFDDKVMKQLKRRRYTGWGRLSRKLINGIRDKQSGKTILDFLKSDGFANRNFMQLIHDDSLTFKEDIQKAQVSGQGDSLHEHIANLAGSPAIKKGILQTVKVVDELVKVMGRHKPENIVIEMARENQTTQKGQKNSRERMKRIEEGIKELGSQILKEHPVENTQLQNEKLYLYYLQNGRDMYVDQELDINRLSDYDVDAIVPQSFLKDDSIDNKVLTRSDKNRGKSDNVPSEEVVKKMKNYWRQLLNAKLITQRKFDNLTKAERGGLSELDKAGFIKRQLVETRQITKHVAQILDSRMNTKYDENDKLIREVKVITLKSKLVSDFRKDFQFYKVREINNYHHAHDAYLNAVVGTALIKKYPKLESEFVYGDYKVYDVRKMIAKSEQEIGKATAKYFFYSNIMNFFKTEITLANGEIRKRPLIETNGETGEIVWDKGRDFATVRKVLSMPQVNIVKKTEVQTGGFSKESILPKRNSDKLIARKKDWDPKKYGGFDSPTVAYSVLVVAKVEKGKSKKLKSVKELLGITIMERSSFEKNPIDFLEAKGYKEVKKDLIIKLPKYSLFELENGRKRMLASAGELQKGNELALPSKYVNFLYLASHYEKLKGSPEDNEQKQLFVEQHKHYLDEIIEQISEFSKRVILADANLDKVLSAYNKHRDKPIREQAENIIHLFTLTNLGAPAAFKYFDTTIDRKRYTSTKEVLDATLIHQSITGLYETRIDLSQLGGDSGGSSGGSSGSETPGTSESATPESSGGSSGGSSTLNIEDEYRLHETSKEPDVSLGSTWLSDFPQAWAETGGMGLAVRQAPLIIPLKATSTPVSIKQYPMSQEARLGIKPHIQRLLDQGILVPCQSPWNTPLLPVKKPGTNDYRPVQDLREVNKRVEDIHPTVPNPYNLLSGLPPSHQWYTVLDLKDAFFCLRLHPTSQPLFAFEWRDPEMGISGQLTWTRLPQGFKNSPTLFNEALHRDLADFRIQHPDLILLQYVDDLLLAATSELDCQQGTRALLQTLGNLGYRASAKKAQICQKQVKYLGYLLKEGQRWLTEARKETVMGQPTPKTPRQLREFLGKAGFCRLFIPGFAEMAAPLYPLTKPGTLFNWGPDQQKAYQEIKQALLTAPALGLPDLTKPFELFVDEKQGYAKGVLTQKLGPWRRPVAYLSKKLDPVAAGWPPCLRMVAAIAVLTKDAGKLTMGQPLVILAPHAVEALVKQPPDRWLSNARMTHYQALLLDTDRVQFGPVVALNPATLLPLPEEGLQHNCLDILAEAHGTRPDLTDQPLPDADHTWYTDGSSLLQEGQRKAGAAVTTETEVIWAKALPAGTSAQRAELIALTQALKMAEGKKLNVYTDSRYAFATAHIHGEIYRRRGWLTSEGKEIKNKDEILALLKALFLPKRLSIIHCPGHQKGHSAEARGNRMADQAARKAAITETPDTSTLLIENSSPSGGSKRTADGSEFEPKKKRKVGGSVSGWRLFKKIS

SEQ ID NO: 616 - DNA, 6396 bp, synthetic construct
  source 1..6396: mol_type = other DNA
atgaagagaaccgccgacggcagcgagttcgagagccccaagaagaagagaaaggtggacaagaagtacagcatcggcctggacatcggcaccaacagcgtgggctgggccgtgatcaccgacgagtacaaggtgcccagcaagaagttcaaggtgctgggcaacaccgacagacacagcatcaagaagaacctgatcggcgccctgctgttcgacagcggcgagaccgccgaggccaccagactgaagagaaccgccagaagaagatacaccagaagaaagaacagaatctgctacctgcaggagatcttcagcaacgagatggccaaggtggacgacagcttcttccacagactggaggagagcttcctggtggaggaggacaagaagcacgagagacaccccatcttcggcaacatcgtggacgaggtggcctaccacgagaagtaccccaccatctaccacctgagaaagaagctggtggacagcaccgacaaggccgacctgagactgatctacctggccctggcccacatgatcaagttcagaggccacttcctgatcgagggcgacctgaaccccgacaacagcgacgtggacaagctgttcatccagctggtgcagacctacaaccagctgttcgaggagaaccccatcaacgccagcggcgtggacgccaaggccatcctgagcgccagactgagcaagagcagaagactggagaacctgatcgcccagctgcccggcgagaagaagaacggcctgttcggcaacctgatcgccctgagcctgggcctgacccccaacttcaagagcaacttcgacctggccgaggacgccaagctgcagctgagcaaggacacctacgacgacgacctggacaacctgctggcccagatcggcgaccagtacgccgacctgttcctggccgccaagaacctgagcgacgccatcctgctgagcgacatcctgagagtgaacaccgagatcaccaaggcccccctgagcgccagcatgatcaagagatacgacgagcaccaccaggacctgaccctgctgaaggccctggtgagacagcagctgcccgagaagtacaaggagatcttcttcgaccagagcaagaacggctacgccggctacatcgacggcggcgccagccaggaggagttctacaagttcatcaagcccatcctggagaagatggacggcaccgaggagctgctggtgaagctgaacagagaggacctgctgagaaagcagagaaccttcgacaacggcagcatcccccaccagatccacctgggcgagctgcacgccatcctgagaagacaggaggacttctaccccttcctgaaggacaacagagagaagatcgagaagatcctgaccttcagaatcccctactacgtgggccccctggccagaggcaacagcagattcgcctggatgaccagaaagagcgaggagaccatcaccccctggaacttcgaggaggtggtggacaagggcgccagcgcccagagcttcatcgagagaatgaccaacttcgacaagaacctgcccaacgagaaggtgctgcccaagcacagcctgctgtacgagtacttcaccgtgtacaacgagctgaccaaggtgaagtacgtgaccgagggcatgagaaagcccgccttcctgagcggcgagcagaagaaggccatcgtggacctgctgttcaagaccaacagaaaggtgaccgtgaagcagctgaaggaggactacttcaagaagatcgagtgcttcgacagcgtggagatcagcggcgtggaggacagattcaacgccagcctgggcacctaccacgacctgctgaagatcatcaaggacaaggacttcctggacaacgaggagaacgaggacatcctggaggacatcgtgctgaccctgaccctgttcgaggacagagagatgatcgaggagagactgaagacctacgcccacctgttcgacgacaaggtgatgaagcagctgaagagaagaagatacaccggctggggcagactgagcagaaagctgatcaacggcatcagagacaagcagagcggcaagaccatcctggacttcctgaagagtgacggcttcgccaacagaaacttcatgcagctgatccacgacgacagcctgaccttcaaggaggacatccagaaggcccaggtgagcggccagggcgacagcctgcacgagcacatcgccaacctggccggcagccccgccatcaagaagggcatcctgcagaccgtgaaggtggtggacgagctggtgaaggtgatgggcagacacaagcccgagaacatcgtgatcgagatggccagagagaaccagaccacccagaagggccagaagaacagcagagagagaatgaagagaatcgaggagggcatcaaggagctgggcagccagatcctgaaggagcaccccgtggagaacacccagctgcagaacgagaagctgtacctgtactacctgcagaacggcagagacatgtacgtggaccaggagctggacatcaacagactgagcgactacgacgtggacgccatcgtgccccagagcttcctgaaggacgacagcatcgacaacaaggtgctgaccagaagcgacaagaacagaggcaagagcgacaacgtgcccagcgaggaggtggtgaagaagatgaagaactactggagacagctgctgaacgccaagctgatcacccagagaaagttcgacaacctgaccaaggccgagagaggcggcctgagcgagctggacaaggccggcttcatcaagagacagctggtggagaccagacagatcaccaagcacgtggcccagatcctggacagcagaatgaacaccaagtacgacgagaacgacaagctgatcagagaggtgaaggtgatcaccctgaagagtaagctggtgagcgacttcagaaaggacttccagttctacaaggtgagagagatcaacaactaccaccacgcccacgacgcctacctgaacgccgtggtgggcaccgccctgatcaagaagtaccccaagctggagagcgagttcgtgtacggcgactacaaggtgtacgacgtgagaaagatgatcgccaagagcgagcaggagatcggcaaggccaccgccaagtacttcttctacagcaacatcatgaacttcttcaagaccgagatcaccctggccaacggcgagatcagaaagagacccctgatcgagaccaacggcgagaccggcgagatcgtgtgggacaagggcagagacttcgccaccgtgagaaaggtgctgagcatgccccaggtgaacatcgtgaagaagaccgaggtgcagaccggcggcttcagcaaggagagcatcctgcccaagagaaacagcgacaagctgatcgccagaaagaaggactgggaccccaagaagtacggcggcttcgacagccccaccgtggcctacagcgtgctggtggtggccaaggtggagaagggcaagagcaagaagctgaagagtgtgaaggagctgctgggcatcaccatcatggagagaagcagcttcgagaagaaccccatcgacttcctggaggccaagggctacaaggaggtgaagaaggacctgatcatcaagctgcccaagtacagcctgttcgagctggagaacggcagaaagagaatgctggccagcgccggcgagctgcagaagggcaacgagctggccctgcccagcaagtacgtgaacttcctgtacctggccagccactacgagaagctgaagggcagccccgaggacaacgagcagaagcagctgttcgtggagcagcacaagcactacctggacgagatcatcgagcagatcagcgagttcagcaagagagtgatcctggccgacgccaacctggacaaggtgctgagcgcctacaacaagcacagagacaagcccatcagagagcaggccgagaacatcatccacctgttcaccctgaccaacctgggcgcccccgccgccttcaagtacttcgacaccaccatcgacagaaagagatacaccagcaccaaggaggtgctggacgccaccctgatccaccagagcatcaccggcctgtacgagaccagaatcgacctgagccagctgggcggcgacagcggcggcagcagcggcggcagcagcggcagcgagacccccggcaccagcgagagcgccacccccgagagcagcggcggcagcagcggcggcagcagcaccctgaacatcgaggacgagtacagactgcacgagaccagcaaggagcccgacgtgagcctgggcagcacctggctgagcgacttcccccaggcctgggccgagaccggcggcatgggcctggccgtgagacaggcccccctgatcatccccctgaaggccaccagcacccccgtgagcatcaagcagtaccccatgagccaggaggccagactgggcatcaagccccacatccagagactgctggaccagggcatcctggtgccctgccagagcccctggaacacccccctgctgcccgtgaagaagcccggcaccaacgactacagacccgtgcaggacctgagagaggtgaacaagagagtggaggacatccaccccaccgtgcccaacccctacaacctgctgagcggcctgccccccagccaccagtggtacaccgtgctggacctgaaggacgccttcttctgcctgagactgcaccccaccagccagcccctgttcgccttcgagtggagagaccccgagatgggcatcagcggccagctgacctggaccagactgccccagggcttcaagaacagccccaccctgttcaacgaggccctgcacagagacctggccgacttcagaatccagcaccccgacctgatcctgctgcagtacgtggacgacctgctgctggccgccaccagcgagctggactgccagcagggcaccagagccctgctgcagaccctgggcaacctgggctacagagccagcgccaagaaggcccagatctgccagaagcaggtgaagtacctgggctacctgctgaaggagggccagagatggctgaccgaggccagaaaggagaccgtgatgggccagcccacccccaagacccccagacagctgagagagttcctgggcaaggccggcttctgcagactgttcatccccggcttcgccgagatggccgcccccctgtaccccctgaccaagcccggcaccctgttcaactggggccccgaccagcagaaggcctaccaggagatcaagcaggccctgctgaccgcccccgccctgggcctgcccgacctgaccaagcccttcgagctgttcgtggacgagaagcagggctacgccaagggcgtgctgacccagaagctgggcccctggagaagacccgtggcctacctgagcaagaagctggaccccgtggccgccggctggcccccctgcctgagaatggtggccgccatcgccgtgctgaccaaggacgccggcaagctgaccatgggccagcccctggtgatcctggccccccacgccgtggaggccctggtgaagcagccccccgacagatggctgagcaacgccagaatgacccactaccaggccctgctgctggacaccgacagagtgcagttcggccccgtggtggccctgaaccccgccaccctgctgcccctgcccgaggagggcctgcagcacaactgcctggacatcctggccgaggcccacggcaccagacccgacctgaccgaccagcccctgcccgacgccgaccacacctggtacaccgacggcagcagcctgctgcaggagggccagagaaaggccggcgccgccgtgaccaccgagaccgaggtgatctgggccaaggccctgcccgccggcaccagcgcccagagagccgagctgatcgccctgacccaggccctgaagatggccgagggcaagaagctgaacgtgtacaccgacagcagatacgccttcgccaccgcccacatccacggcgagatctacagaagaagaggctggctgaccagcgagggcaaggagatcaagaacaaggacgagatcctggccctgctgaaggccctgttcctgcccaagagactgagcatcatccactgccccggccaccagaagggccacagcgccgaggccagaggcaacagaatggccgaccaggccgccagaaaggccgccatcaccgagacccccgacaccagcaccctgctgatcgagaacagcagccccagcggcggcagcaagagaaccgccgacggcagcgagttcgagcccaagaagaagagaaaggtgggcggcagcgtgagcggctggagactgttcaagaagatcagctga

SEQ ID NO: 617 - protein, 2117 aa, synthetic construct
MKRTADGSEFESPKKKRKVDKKYSIGLDIGTNSVGWAVITDEYKVPSKKFKVLGNTDRHSIKKNLIGALLFDSGETAEATRLKRTARRRYTRRKNRICYLQEIFSNEMAKVDDSFFHRLEESFLVEEDKKHERHPIFGNIVDEVAYHEKYPTIYHLRKKLVDSTDKADLRLIYLALAHMIKFRGHFLIEGDLNPDNSDVDKLFIQLVQTYNQLFEENPINASGVDAKAILSARLSKSRRLENLIAQLPGEKKNGLFGNLIALSLGLTPNFKSNFDLAEDAKLQLSKDTYDDDLDNLLAQIGDQYADLFLAAKNLSDAILLSDILRVNTEITKAPLSASMIKRYDEHHQDLTLLKALVRQQLPEKYKEIFFDQSKNGYAGYIDGGASQEEFYKFIKPILEKMDGTEELLVKLNREDLLRKQRTFDNGSIPHQIHLGELHAILRRQEDFYPFLKDNREKIEKILTFRIPYYVGPLARGNSRFAWMTRKSEETITPWNFEEVVDKGASAQSFIERMTNFDKNLPNEKVLPKHSLLYEYFTVYNELTKVKYVTEGMRKPAFLSGEQKKAIVDLLFKTNRKVTVKQLKEDYFKKIECFDSVEISGVEDRFNASLGTYHDLLKIIKDKDFLDNEENEDILEDIVLTLTLFEDREMIEERLKTYAHLFDDKVMKQLKRRRYTGWGRLSRKLINGIRDKQSGKTILDFLKSDGFANRNFMQLIHDDSLTFKEDIQKAQVSGQGDSLHEHIANLAGSPAIKKGILQTVKVVDELVKVMGRHKPENIVIEMARENQTTQKGQKNSRERMKRIEEGIKELGSQILKEHPVENTQLQNEKLYLYYLQNGRDMYVDQELDINRLSDYDVDAIVPQSFLKDDSIDNKVLTRSDKNRGKSDNVPSEEVVKKMKNYWRQLLNAKLITQRKFDNLTKAERGGLSELDKAGFIKRQLVETRQITKHVAQILDSRMNTKYDENDKLIREVKVITLKSKLVSDFRKDFQFYKVREINNYHHAHDAYLNAVVGTALIKKYPKLESEFVYGDYKVYDVRKMIAKSEQEIGKATAKYFFYSNIMNFFKTEITLANGEIRKRPLIETNGETGEIVWDKGRDFATVRKVLSMPQVNIVKKTEVQTGGFSKESILPKRNSDKLIARKKDWDPKKYGGFDSPTVAYSVLVVAKVEKGKSKKLKSVKELLGITIMERSSFEKNPIDFLEAKGYKEVKKDLIIKLPKYSLFELENGRKRMLASAGELQKGNELALPSKYVNFLYLASHYEKLKGSPEDNEQKQLFVEQHKHYLDEIIEQISEFSKRVILADANLDKVLSAYNKHRDKPIREQAENIIHLFTLTNLGAPAAFKYFDTTIDRKRYTSTKEVLDATLIHQSITGLYETRIDLSQLGGDSGGSSGGSSGSETPGTSESATPESSGGSSGGSSTLNIEDEYRLHETSKEPDVSLGSTWLSDFPQAWAETGGMGLAVRQAPLIIPLKATSTPVSIKQYPMSQEARLGIKPHIQRLLDQGILVPCQSPWNTPLLPVKKPGTNDYRPVQDLREVNKRVEDIHPTVPNPYNLLSGLPPSHQWYTVLDLKDAFFCLRLHPTSQPLFAFEWRDPEMGISGQLTWTRLPQGFKNSPTLFNEALHRDLADFRIQHPDLILLQYVDDLLLAATSELDCQQGTRALLQTLGNLGYRASAKKAQICQKQVKYLGYLLKEGQRWLTEARKETVMGQPTPKTPRQLREFLGKAGFCRLFIPGFAEMAAPLYPLTKPGTLFNWGPDQQKAYQEIKQALLTAPALGLPDLTKPFELFVDEKQGYAKGVLTQKLGPWRRPVAYLSKKLDPVAAGWPPCLRMVAAIAVLTKDAGKLTMGQPLVILAPHAVEALVKQPPDRWLSNARMTHYQALLLDTDRVQFGPVVALNPATLLPLPEEGLQHNCLDILAEAHGTRPDLTDQPLPDADHTWYTDGSSLLQEGQRKAGAAVTTETEVIWAKALPAGTSAQRAELIALTQALKMAEGKKLNVYTDSRYAFATAHIHGEIYRRRGWLTSEGKEIKNKDEILALLKALFLPKRLSIIHCPGHQKGHSAEARGNRMADQAARKAAITETPDTSTLLIENSSPSGGSKRTADGSEFEPKKKRKV

SEQ ID NO: 618 - protein, 522 aa, synthetic construct
MPAAKRVKLDGGSRALVVIRLSRVTDATTSPERQLESCQQLCAQRGWDVVGVAEDLDVSGAVDPFDRKRRPNLARWLAFEEQPFDVIVAYRVDRLTRSIRHLQQLVHWAEDHKKLVVSATEAHFDTTTPFAAVVIALMGTVAQMELEAIKERNRSAAHFNIRAGKYRGSLPPWGYLPTRVDGEWRLVPDPVQRERILEVYHRVVDNHEPLHLVAHDLNRRGVLSPKDYFAQLQGREPQGREWSATALKRSMISEAMLGYATLNGKTVRDDDGAPLVRAEPILTREQLEALRAELVKTSRAKPAVSTPSLLLRVLFCAVCGEPAYKFAGGGRKHPRYRCRSMGFPKHCGNGTVAMAEWDAFCEEQVLDLLGDAERLEKVWVAGSDSAVELAEVNAELVDLTSLIGSPAYRAGSPQREALDARIAALAARQEELEGLEARPSGWEWRETGQRFGDWWREQDTAAKNTWLRSMNVRLTFDVRGGLTRTIDFGDLQEYEQHLRLGSVVERLHTGMSGGSPKKKRKV

SEQ ID NO: 619 - DNA, 1569 bp, synthetic construct
  source 1..1569: mol_type = other DNA
atgcctgctgctaagagagtgaaactggatggcggcagcagagccctggtggtgatcagactgagcagagtgaccgacgccaccaccagccccgagagacagctggagagctgccagcagctgtgcgcccagagaggctgggacgtggtgggcgtggccgaggacctggacgtgagcggcgccgtggaccccttcgacagaaagagaagacccaacctggccagatggctggccttcgaggagcagcccttcgacgtgatcgtggcctacagagtggacagactgaccagaagcatcagacacctgcagcagctggtgcactgggccgaggaccacaagaagctggtggtgagcgccaccgaggcccacttcgacaccaccacccccttcgccgccgtggtgatcgccctgatgggcaccgtggcccagatggagctggaggccatcaaggagagaaacagaagcgccgcccacttcaacatcagagccggcaagtacagaggcagcctgcccccctggggctacctgcccaccagagtggacggcgagtggagactggtgcccgaccccgtgcagagagagagaatcctggaggtgtaccacagagtggtggacaaccacgagcccctgcacctggtggcccacgacctgaacagaagaggcgtgctgagccccaaggactacttcgcccagctgcagggcagagagccccagggcagagagtggagcgccaccgccctgaagagaagcatgatcagcgaggccatgctgggctacgccaccctgaacggcaagaccgtgagagacgacgacggcgcccccctggtgagagccgagcccatcctgaccagagagcagctggaggccctgagagccgagctggtgaagaccagcagagccaagcccgccgtgagcacccccagcctgctgctgagagtgctgttctgcgccgtgtgcggcgagcccgcctacaagttcgccggcggcggcagaaagcaccccagatacagatgcagaagcatgggcttccccaagcactgcggcaacggcaccgtggccatggccgagtgggacgccttctgcgaggagcaggtgctggacctgctgggcgacgccgagagactggagaaggtgtgggtggccggcagcgacagcgccgtggagctggccgaggtgaacgccgagctggtggacctgaccagcctgatcggcagccccgcctacagagccggcagcccccagagagaggccctggacgccagaatcgccgccctggccgccagacaggaggagctggagggcctggaggccagacccagcggctgggagtggagagagaccggccagagattcggcgactggtggagagagcaggacaccgccgccaagaacacctggctgagaagcatgaacgtgagactgaccttcgacgtgagaggcggcctgaccagaaccatcgacttcggcgacctgcaggagtacgagcagcacctgagactgggcagcgtggtggagagactgcacaccggcatgagcggcggcagccccaagaagaagagaaaggtgtga

SEQ ID NO: 620 - DNA, 4425 bp, synthetic construct
  source 1..4425: mol_type = other DNA
tcgcgcgtttcggtgatgacggtgaaaacctctgacacatgcagctcccggagacggtcacagcttgtctgtaagcggatgccgggagcagacaagcccgtcagggcgcgtcagcgggtgttggcgggtgtcggggctggcttaactatgcggcatcagagcagattgtactgagagtgcaccatatgcggtgtgaaataccgcacagatgcgtaaggagaaaataccgcatcaggcgccattcgccattcaggctgcgcaactgttgggaagggcgatcggtgcgggcctcttcgctattacgccagctggcgaaagggggatgtgctgcaaggcgattaagttgggtaacgccagggttttcccagtcacgacgttgtaaaacgacggccagagaattcgagctcggtacctaatacgactcactataaggaagctcagaataaacgctcaactttggccggatctgccaccatgcccaagaagaagagaaaggtgtacccctacgacgtgcccgactacgccggcagcagagccctggtggtgatcagactgagcagagtgaccgacgccaccaccagccccgagagacagctggagagctgccagcagctgtgcgcccagagaggctgggacgtggtgggcgtggccgaggacctggacgtgagcggcgccgtggaccccttcgacagaaagagaagacccaacctggccagatggctggccttcgaggagcagcccttcgacgtgatcgtggcctacagagtggacagactgaccagaagcatcagacacctgcagcagctggtgcactgggccgaggaccacaagaagctggtggtgagcgccaccgaggcccacttcgacaccaccacccccttcgccgccgtggtgatcgccctgatgggcaccgtggcccagatggagctggaggccatcaaggagagaaacagaagcgccgcccacttcaacatcagagccggcaagtacagaggcagcctgcccccctggggctacctgcccaccagagtggacggcgagtggagactggtgcccgaccccgtgcagagagagagaatcctggaggtgtaccacagagtggtggacaaccacgagcccctgcacctggtggcccacgacctgaacagaagaggcgtgctgagccccaaggactacttcgcccagctgcagggcagagagccccagggcagagagtggagcgccaccgccctgaagagaagcatgatcagcgaggccatgctgggctacgccaccctgaacggcaagaccgtgagagacgacgacggcgcccccctggtgagagccgagcccatcctgaccagagagcaggtggaggccctgagagccgagctggtgaagaccagcagagccaagcccgccgtgagcacccccagcctgctgctgagagtgctgttctgcgccgtgtgcggcgagcccgcctacaagttcgccggcggcggcagaaagcaccccagatacagatgcagaagcatgggcttccccaagcactgcggcaacggcaccgtggccatggccgagtgggacgccttctgcgaggagcaggtgctggacctgctgggcgacgccgagagactggagaaggtgtgggtggccggcagcgacagcgccgtggagctggccgaggtgaacgccgagctggtggacctgaccagcctgatcggcagccccgcctacagagccggcagcccccagagagaggccctggacgccagaatcgccgccctggccgccagacaggaggagctggagggcctggaggccagacccagcggctgggagtggagagagaccggccagagattcggcgactggtggagagagcaggacaccgccgccaagaacacctggctgagaagcatgaacgtgagactgaccttcgacgtgagaggcggcctgaccagaaccatcgacttcggcgacctgcaggagtacgagcagcacctgagactgggcagcgtggtggagagactgcacaccggcatgagctgatgaaccagcctcaagaacacccgaatggagtctctaagctacataataccaacttacactttacaaaatgttgtcccccaaaatgtagccattcgtatctgctcctaataaaaagaaagtttcttcacattctaaaaaaaaaaaaaaaaaaaaaaaaaaaaaaaaaaaaaaaaaaaaaaaaaaaaaaaaaaaaaaaaaaaaaaaaaaaaaaaatgaagagcaggcctgcatgcaagcttctagcataaccccttggggcctctaaacgggtcttgaggggttttttgggtgtaatcatggtcatagctgtttcctgtgtgaacagcctggggctcaccttcgggtgggcctttctgcgggtgcctaatgagtgagctaactcacattaattgcgttgcgctcactgcccgctttccagtcgggaaacctgtcgtgccagctgcattaatgaatcggccaacgcgcggggagaggcggtttgcgtattgggcgccgaagaaaggcccacccgtgaaggtgagcctcttccgcttcctcgctcactgactcgctgcgctcggtcgttcggctgcggcgagcggtatcagctcactcaaaggcggtaatacggttatccacagaatcaggggataacgcaggaaagaacatgtgagcaaaaggccagcaaaaggccaggaaccgtaaaaaggccgcgttgctggcgtttttccataggctccgcccccctgacgagcatcacaaaaatcgacgctcaagtcagaggtggcgaaacccgacaggactataaagataccaggcgtttccccctggaagctccctcgtgcgctctcctgttccgaccctgccgcttaccggatacctgtccgcctttctcccttcgggaagcgtggcgctttctcatagctcacgctgtaggtatctcagttcggtgtaggtcgttcgctccaagctgggctgtgtgcacgaaccccccgttcagcccgaccgctgcgccttatccggtaactatcgtcttgagtccaacccggtaagacacgacttatcgccactggcagcagccactggtaacaggattagcagagcgaggtatgtaggcggtgctacagagttcttgaagtggtggcctaactacggctacactagaagaacagtatttggtatctgcgctctgctgaagccagttaccttcggaaaaagagttggtagctcttgatccggcaaacaaaccaccgctggtagcggtggtttttttgtttgcaagcagcagattacgcgcagaaaaaaaggatctcaagaagatcctttgatcttttctacggggtctgacgctcagtggaacgaaaactcacgttaagggattttggtcatgagattatcaaaaaggatcttcacctagatccttttaaattaaaaatgaagttttaaatcaagcccaatctgaataatgttacaaccaattaaccaattctgattagaaaaactcatcgagcatcaaatgaaactgcaatttattcatatcaggattatcaataccatatttttgaaaaagccgtttctgtaatgaaggagaaaactcaccgaggcagttccataggatggcaagatcctggtatcggtctgcgattccgactcgtccaacatcaatacaacctattaatttcccctcgtcaaaaataaggttatcaagtgagaaatcaccatgagtgacgactgaatccggtgagaatggcaaaagtttatgcatttctttccagacttgttcaacaggccagccattacgctcgtcatcaaaatcactcgcatcaaccaaaccgttattcattcgtgattgcgcctgagcgagacgaaatacgcgatcgctgttaaaaggacaattacaaacaggaatcgaatgcaaccggcgcaggaacactgccagcgcatcaacaatattttcacctgaatcaggatattcttctaatacctggaatgctgtttttccggggatcgcagtggtgagtaaccatgcatcatcaggagtacggataaaatgcttgatggtcggaagaggcataaattccgtcagccagtttagtctgaccatctcatctgtaacatcattggcaacgctacctttgccatgtttcagaaacaactctggcgcatcgggcttcccatacaagcgatagattgtcgcacctgattgcccgacattatcgcgagcccatttatacccatataaatcagcatccatgttggaatttaatcgcggcctcgacgtttcccgttgaatatggctcataacaccccttgtattactgtttatgtaagcagacagttttattgttcatgatgatatatttttatcttgtgcaatgtaacatcagagattttgagacacgggccagagctgca

SEQ ID NO: 621 - protein, 531 aa, synthetic construct
MPKKKRKVYPYDVPDYAKDKKSDGKDSQKKGSRALVVIRLSRVTDATTSPERQLESCQQLCAQRGWDVVGVAEDLDVSGAVDPFDRKRRPNLARWLAFEEQPFDVIVAYRVDRLTRSIRHLQQLVHWAEDHKKLVVSATEAHFDTTTPFAAVVIALMGTVAQMELEAIKERNRSAAHFNIRAGKYRGSLPPWGYLPTRVDGEWRLVPDPVQRERILEVYHRVVDNHEPLHLVAHDLNRRGVLSPKDYFAQLQGREPQGREWSATALKRSMISEAMLGYATLNGKTVRDDDGAPLVRAEPILTREQLEALRAELVKTSRAKPAVSTPSLLLRVLFCAVCGEPAYKFAGGGRKHPRYRCRSMGFPKHCGNGTVAMAEWDAFCEEQVLDLLGDAERLEKVWVAGSDSAVELAEVNAELVDLTSLIGSPAYRAGSPQREALDARIAALAARQEELEGLEARPSGWEWRETGQRFGDWWREQDTAAKNTWLRSMNVRLTFDVRGGLTRTIDFGDLQEYEQHLRLGSVVERLHTGMS

SEQ ID NO: 622 - DNA, 1596 bp, synthetic construct
  source 1..1596: mol_type = other DNA
atgcccaagaagaagagaaaggtgtacccctacgacgtgcccgactacgccaaggacaagaaatccgatggcaaggacagccagaaaaaaggcagcagagccctggtggtgatcagactgagcagagtgaccgacgccaccaccagccccgagagacagctggagagctgccagcagctgtgcgcccagagaggctgggacgtggtgggcgtggccgaggacctggacgtgagcggcgccgtggaccccttcgacagaaagagaagacccaacctggccagatggctggccttcgaggagcagcccttcgacgtgatcgtggcctacagagtggacagactgaccagaagcatcagacacctgcagcagctggtgcactgggccgaggaccacaagaagctggtggtgagcgccaccgaggcccacttcgacaccaccacccccttcgccgccgtggtgatcgccctgatgggcaccgtggcccagatggagctggaggccatcaaggagagaaacagaagcgccgcccacttcaacatcagagccggcaagtacagaggcagcctgcccccctggggctacctgcccaccagagtggacggcgagtggagactggtgcccgaccccgtgcagagagagagaatcctggaggtgtaccacagagtggtggacaaccacgagcccctgcacctggtggcccacgacctgaacagaagaggcgtgctgagccccaaggactacttcgcccagctgcagggcagagagccccagggcagagagtggagcgccaccgccctgaagagaagcatgatcagcgaggccatgctgggctacgccaccctgaacggcaagaccgtgagagacgacgacggcgcccccctggtgagagccgagcccatcctgaccagagagcagctggaggccctgagagccgagctggtgaagaccagcagagccaagcccgccgtgagcacccccagcctgctgctgagagtgctgttctgcgccgtgtgcggcgagcccgcctacaagttcgccggcggcggcagaaagcaccccagatacagatgcagaagcatgggcttccccaagcactgcggcaacggcaccgtggccatggccgagtgggacgccttctgcgaggagcaggtgctggacctgctgggcgacgccgagagactggagaaggtgtgggtggccggcagcgacagcgccgtggagctggccgaggtgaacgccgagctggtggacctgaccagcctgatcggcagccccgcctacagagccggcagcccccagagagaggccctggacgccagaatcgccgccctggccgccagacaggaggagctggagggcctggaggccagacccagcggctgggagtggagagagaccggccagagattcggcgactggtggagagagcaggacaccgccgccaagaacacctggctgagaagcatgaacgtgagactgaccttcgacgtgagaggcggcctgaccagaaccatcgacttcggcgacctgcaggagtacgagcagcacctgagactgggcagcgtggtggagagactgcacaccggcatgagctga

SEQ ID NO: 623 - DNA, 4630 bp, synthetic construct
  source 1..4630: mol_type = other DNA
tcgcgcgtttcggtgatgacggtgaaaacctctgacacatgcagctcccggagacggtcacagcttgtctgtaagcggatgccgggagcagacaagcccgtcagggcgcgtcagcgggtgttggcgggtgtcggggctggcttaactatgcggcatcagagcagattgtactgagagtgcaccatatgcggtgtgaaataccgcacagatgcgtaaggagaaaataccgcatcaggcgccattcgccattcaggctgcgcaactgttgggaagggcgatcggtgcgggcctcttcgctattacgccagctggcgaaagggggatgtgctgcaaggcgattaagttgggtaacgccagggttttcccagtcacgacgttgtaaaacgacggccagagaattcgagctcggtacctaatacgactcactatagagaataaactagtattcttctggtccccacagactcagagagaacccgccaccatgcccaagaagaagagaaaggtgtacccctacgacgtgcccgactacgccggcagcagagccctggtggtgatcagactgagcagagtgaccgacgccaccaccagccccgagagacagctggagagctgccagcagctgtgcgcccagagaggctgggacgtggtgggcgtggccgaggacctggacgtgagcggcgccgtggaccccttcgacagaaagagaagacccaacctggccagatggctggccttcgaggagcagcccttcgacgtgatcgtggcctacagagtggacagactgaccagaagcatcagacacctgcagcagctggtgcactgggccgaggaccacaagaagctggtggtgagcgccaccgaggcccacttcgacaccaccacccccttcgccgccgtggtgatcgccctgatgggcaccgtggcccagatggagctggaggccatcaaggagagaaacagaagcgccgcccacttcaacatcagagccggcaagtacagaggcagcctgcccccctggggctacctgcccaccagagtggacggcgagtggagactggtgcccgaccccgtgcagagagagagaatcctggaggtgtaccacagagtggtggacaaccacgagcccctgcacctggtggcccacgacctgaacagaagaggcgtgctgagccccaaggactacttcgcccagctgcagggcagagagccccagggcagagagtggagcgccaccgccctgaagagaagcatgatcagcgaggccatgctgggctacgccaccctgaacggcaagaccgtgagagacgacgacggcgcccccctggtgagagccgagcccatcctgaccagagagcagctggaggccctgagagccgagctggtgaagaccagcagagccaagcccgccgtgagcacccccagcctgctgctgagagtgctgttctgcgccgtgtgcggcgagcccgcctacaagttcgccggcggcggcagaaagcaccccagatacagatgcagaagcatgggcttccccaagcactgcggcaacggcaccgtggccatggccgagtgggacgccttctgcgaggagcaggtgctggacctgctgggcgacgccgagagactggagaaggtgtgggtggccggcagcgacagcgccgtggagctggccgaggtgaacgccgagctggtggacctgaccagcctgatcggcagccccgcctacagagccggcagcccccagagagaggccctggacgccagaatcgccgccctggccgccagacaggaggagctggagggcctggaggccagacccagcggctgggagtggagagagaccggccagagattcggcgactggtggagagagcaggacaccgccgccaagaacacctggctgagaagcatgaacgtgagactgaccttcgacgtgagaggcggcctgaccagaaccatcgacttcggcgacctgcaggagtacgagcagcacctgagactgggcagcgtggtggagagactgcacaccggcatgagctgataactcgagctggtactgcatgcacgcaatgctagctgcccctttcccgtcctgggtaccccgagtctcccccgacctcgggtcccaggtatgctcccacctccacctgccccactcaccacctctgctagttccagacacctcccaagcacgcagcaatgcagctcaaaacgcttagcctagccacacccccacgggaaacagcagtgattaacctttagcaataaacgaaagtttaactaagctatactaaccccagggttggtcaatttcgtgccagccacaccctggagctagcaaaaaaaaaaaaaaaaaaaaaaaaaaaaaagcatatgactaaaaaaaaaaaaaaaaaaaaaaaaaaaaaaaaaaaaaaaaaaaaaaaaaaaaaaaaaaaaaaaaaaaaaatgaagagcaggcctgcatgcaagcttctagcataaccccttggggcctctaaacgggtcttgaggggttttttgggtgtaatcatggtcatagctgtttcctgtgtgaacagcctggggctcaccttcgggtgggcctttctgcgggtgcctaatgagtgagctaactcacattaattgcgttgcgctcactgcccgctttccagtcgggaaacctgtcgtgccagctgcattaatgaatcggccaacgcgcggggagaggcggtttgcgtattgggcgccgaagaaaggcccacccgtgaaggtgagcctcttccgcttcctcgctcactgactcgctgcgctcggtcgttcggctgcggcgagcggtatcagctcactcaaaggcggtaatacggttatccacagaatcaggggataacgcaggaaagaacatgtgagcaaaaggccagcaaaaggccaggaaccgtaaaaaggccgcgttgctggcgtttttccataggctccgcccccctgacgagcatcacaaaaatcgacgctcaagtcagaggtggcgaaacccgacaggactataaagataccaggcgtttccccctggaagctccctcgtgcgctctcctgttccgaccctgccgcttaccggatacctgtccgcctttctcccttcgggaagcgtggcgctttctcatagctcacgctgtaggtatctcagttcggtgtaggtcgttcgctccaagctgggctgtgtgcacgaaccccccgttcagcccgaccgctgcgccttatccggtaactatcgtcttgagtccaacccggtaagacacgacttatcgccactggcagcagccactggtaacaggattagcagagcgaggtatgtaggcggtgctacagagttcttgaagtggtggcctaactacggctacactagaagaacagtatttggtatctgcgctctgctgaagccagttaccttcggaaaaagagttggtagctcttgatccggcaaacaaaccaccgctggtagcggtggtttttttgtttgcaagcagcagattacgcgcagaaaaaaaggatctcaagaagatcctttgatcttttctacggggtctgacgctcagtggaacgaaaactcacgttaagggattttggtcatgagattatcaaaaaggatcttcacctagatccttttaaattaaaaatgaagttttaaatcaagcccaatctgaataatgttacaaccaattaaccaattctgattagaaaaactcatcgagcatcaaatgaaactgcaatttattcatatcaggattatcaataccatatttttgaaaaagccgtttctgtaatgaaggagaaaactcaccgaggcagttccataggatggcaagatcctggtatcggtctgcgattccgactcgtccaacatcaatacaacctattaatttcccctcgtcaaaaataaggttatcaagtgagaaatcaccatgagtgacgactgaatccggtgagaatggcaaaagtttatgcatttctttccagacttgttcaacaggccagccattacgctcgtcatcaaaatcactcgcatcaaccaaaccgttattcattcgtgattgcgcctgagcgagacgaaatacgcgatcgctgttaaaaggacaattacaaacaggaatcgaatgcaaccggcgcaggaacactgccagcgcatcaacaatattttcacctgaatcaggatattcttctaatacctggaatgctgtttttccggggatcgcagtggtgagtaaccatgcatcatcaggagtacggataaaatgcttgatggtcggaagaggcataaattccgtcagccagtttagtctgaccatctcatctgtaacatcattggcaacgctacctttgccatgtttcagaaacaactctggcgcatcgggcttcccatacaagcgatagattgtcgcacctgattgcccgacattatcgcgagcccatttatacccatataaatcagcatccatgttggaatttaatcgcggcctcgacgtttcccgttgaatatggctcataacaccccttgtattactgtttatgtaagcagacagttttattgttcatgatgatatatttttatcttgtgcaatgtaacatcagagattttgagacacgggccagagctgca

SEQ ID NO: 624 - DNA, 4630 bp, synthetic construct
  source 1..4630: mol_type = other DNA
tcgcgcgtttcggtgatgacggtgaaaacctctgacacatgcagctcccggagacggtcacagcttgtctgtaagcggatgccgggagcagacaagcccgtcagggcgcgtcagcgggtgttggcgggtgtcggggctggcttaactatgcggcatcagagcagattgtactgagagtgcaccatatgcggtgtgaaataccgcacagatgcgtaaggagaaaataccgcatcaggcgccattcgccattcaggctgcgcaactgttgggaagggcgatcggtgcgggcctcttcgctattacgccagctggcgaaagggggatgtgctgcaaggcgattaagttgggtaacgccagggttttcccagtcacgacgttgtaaaacgacggccagagaattcgagctcggtacctaatacgactcactatagagaataaactagtattcttctggtccccacagactcagagagaacccgccaccatgccaaagaagaagcgaaaggtgtatccctacgacgtgcccgactacgccggtagtcgggcactcgtagtgatacgcctttcgcgggtcactgatgcaacgacgagtccagagcgtcagctggaatcctgtcagcagctatgcgcgcagaggggctgggacgtggtcggcgtggctgaggatttggacgtctctggtgcggtcgatcccttcgaccgcaagagacgtccaaacctcgcccgctggctcgcgttcgaggagcagcccttcgacgtgatagttgcttacagggttgaccggctgacgcgctcgattcgtcacttgcagcagttggtccactgggcggaggaccacaagaagcttgtggtctccgccacagaggcccacttcgacaccacgacgcccttcgcggcagtggtgatcgccttgatgggcactgtagctcagatggagctagaggccatcaaggagcggaaccggagcgccgctcacttcaacatccgggcgggcaagtaccgagggagtctgcctccctggggttacttgcccacccgggtggatggtgagtggcgcctggttccggaccctgtccagagggagcggatcttggaggtctaccaccgtgtggtagacaaccatgagccgctccatctggtggcccacgatctcaatcggcgcggagtgctgtcgcccaaggactacttcgcccagctccaggggcgggagccccaggggcgggagtggtccgcgacagcactcaagcgctcgatgatatcggaggccatgctcggctacgcaacgcttaacggcaagactgttcgcgatgacgatggggctccgctcgtgagagcggagcccattctcactcgcgagcagcttgaagcgttgcgagccgagctggtgaagacatcgcgggctaagcccgcggtgtctacaccatctttgttgcttcgggtcctcttctgcgctgtatgcggggagcccgcatacaagttcgcaggagggggccggaagcacccacggtaccgttgccgcagtatgggttttcccaagcactgcggcaacggtaccgtggccatggctgagtgggacgccttctgcgaggagcaagtgctggatctgctcggcgacgccgagcgcctggagaaggtgtgggtcgccgggtcagattcagcagttgaactcgcagaggtgaacgctgagctcgtggacctcacctcgctaatcgggagtccagcgtatcgcgcggggtctccccagcgcgaggcgctggacgcccgaatagcggcgctggccgcccgccaggaggagctggagggcctggaggccaggccctccggctgggagtggcgggagaccggccagcgcttcggagattggtggcgcgagcaggacaccgcagccaagaacacttggctgcggtccatgaacgtgcggctaaccttcgacgtgcgcgggggcttgacccggaccatcgacttcggtgaccttcaggagtatgaacagcacctgaggttggggtccgtggtcgagcgcctgcacacggggatgagctgataactcgagctggtactgcatgcacgcaatgctagctgcccctttcccgtcctgggtaccccgagtctcccccgacctcgggtcccaggtatgctcccacctccacctgccccactcaccacctctgctagttccagacacctcccaagcacgcagcaatgcagctcaaaacgcttagcctagccacacccccacgggaaacagcagtgattaacctttagcaataaacgaaagtttaactaagctatactaaccccagggttggtcaatttcgtgccagccacaccctggagctagcaaaaaaaaaaaaaaaaaaaaaaaaaaaaaagcatatgactaaaaaaaaaaaaaaaaaaaaaaaaaaaaaaaaaaaaaaaaaaaaaaaaaaaaaaaaaaaaaaaaaaaaaatgaagagcaggcctgcatgcaagcttctagcataaccccttggggcctctaaacgggtcttgaggggttttttgggtgtaatcatggtcatagctgtttcctgtgtgaacagcctggggctcaccttcgggtgggcctttctgcgggtgcctaatgagtgagctaactcacattaattgcgttgcgctcactgcccgctttccagtcgggaaacctgtcgtgccagctgcattaatgaatcggccaacgcgcggggagaggcggtttgcgtattgggcgccgaagaaaggcccacccgtgaaggtgagcctcttccgcttcctcgctcactgactcgctgcgctcggtcgttcggctgcggcgagcggtatcagctcactcaaaggcggtaatacggttatccacagaatcaggggataacgcaggaaagaacatgtgagcaaaaggccagcaaaaggccaggaaccgtaaaaaggccgcgttgctggcgtttttccataggctccgcccccctgacgagcatcacaaaaatcgacgctcaagtcagaggtggcgaaacccgacaggactataaagataccaggcgtttccccctggaagctccctcgtgcgctctcctgttccgaccctgccgcttaccggatacctgtccgcctttctcccttcgggaagcgtggcgctttctcatagctcacgctgtaggtatctcagttcggtgtaggtcgttcgctccaagctgggctgtgtgcacgaaccccccgttcagcccgaccgctgcgccttatccggtaactatcgtcttgagtccaacccggtaagacacgacttatcgccactggcagcagccactggtaacaggattagcagagcgaggtatgtaggcggtgctacagagttcttgaagtggtggcctaactacggctacactagaagaacagtatttggtatctgcgctctgctgaagccagttaccttcggaaaaagagttggtagctcttgatccggcaaacaaaccaccgctggtagcggtggtttttttgtttgcaagcagcagattacgcgcagaaaaaaaggatctcaagaagatcctttgatcttttctacggggtctgacgctcagtggaacgaaaactcacgttaagggattttggtcatgagattatcaaaaaggatcttcacctagatccttttaaattaaaaatgaagttttaaatcaagcccaatctgaataatgttacaaccaattaaccaattctgattagaaaaactcatcgagcatcaaatgaaactgcaatttattcatatcaggattatcaataccatatttttgaaaaagccgtttctgtaatgaaggagaaaactcaccgaggcagttccataggatggcaagatcctggtatcggtctgcgattccgactcgtccaacatcaatacaacctattaatttcccctcgtcaaaaataaggttatcaagtgagaaatcaccatgagtgacgactgaatccggtgagaatggcaaaagtttatgcatttctttccagacttgttcaacaggccagccattacgctcgtcatcaaaatcactcgcatcaaccaaaccgttattcattcgtgattgcgcctgagcgagacgaaatacgcgatcgctgttaaaaggacaattacaaacaggaatcgaatgcaaccggcgcaggaacactgccagcgcatcaacaatattttcacctgaatcaggatattcttctaatacctggaatgctgtttttccggggatcgcagtggtgagtaaccatgcatcatcaggagtacggataaaatgcttgatggtcggaagaggcataaattccgtcagccagtttagtctgaccatctcatctgtaacatcattggcaacgctacctttgccatgtttcagaaacaactctggcgcatcgggcttcccatacaagcgatagattgtcgcacctgattgcccgacattatcgcgagcccatttatacccatataaatcagcatccatgttggaatttaatcgcggcctcgacgtttcccgttgaatatggctcataacaccccttgtattactgtttatgtaagcagacagttttattgttcatgatgatatatttttatcttgtgcaatgtaacatcagagattttgagacacgggccagagctgca

SEQ ID NO: 625 - protein, 533 aa, synthetic construct
MPKKKRKVQPRFAAAGSGKDKKSDGKDSQKKGSGRALVVIRLSRVTDATTSPERQLESCQQLCAQRGWDVVGVAEDLDVSGAVDPFDRKRRPNLARWLAFEEQPFDVIVAYRVDRLTRSIRHLQQLVHWAEDHKKLVVSATEAHFDTTTPFAAVVIALMGTVAQMELEAIKERNRSAAHFNIRAGKYRGSLPPWGYLPTRVDGEWRLVPDPVQRERILEVYHRVVDNHEPLHLVAHDLNRRGVLSPKDYFAQLQGREPQGREWSATALKRSMISEAMLGYATLNGKTVRDDDGAPLVRAEPILTREQLEALRAELVKTSRAKPAVSTPSLLLRVLFCAVCGEPAYKFAGGGRKHPRYRCRSMGFPKHCGNGTVAMAEWDAFCEEQVLDLLGDAERLEKVWVAGSDSAVELAEVNAELVDLTSLIGSPAYRAGSPQREALDARIAALAARQEELEGLEARPSGWEWRETGQRFGDWWREQDTAAKNTWLRSMNVRLTFDVRGGLTRTIDFGDLQEYEQHLRLGSVVERLHTGMS

SEQ ID NO: 626 - DNA, 1602 bp, synthetic construct
  source 1..1602: mol_type = other DNA
atgcccaagaagaagagaaaggtgcaaccgcggttcgcggccgctggcagcggcaaggacaagaaatccgatggcaaggacagccagaaaaaaggcagcggcagagccctggtggtgatcagactgagcagagtgaccgacgccaccaccagccccgagagacagctggagagctgccagcagctgtgcgcccagagaggctgggacgtggtgggcgtggccgaggacctggacgtgagcggcgccgtggaccccttcgacagaaagagaagacccaacctggccagatggctggccttcgaggagcagcccttcgacgtgatcgtggcctacagagtggacagactgaccagaagcatcagacacctgcagcagctggtgcactgggccgaggaccacaagaagctggtggtgagcgccaccgaggcccacttcgacaccaccacccccttcgccgccgtggtgatcgccctgatgggcaccgtggcccagatggagctggaggccatcaaggagagaaacagaagcgccgcccacttcaacatcagagccggcaagtacagaggcagcctgcccccctggggctacctgcccaccagagtggacggcgagtggagactggtgcccgaccccgtgcagagagagagaatcctggaggtgtaccacagagtggtggacaaccacgagcccctgcacctggtggcccacgacctgaacagaagaggcgtgctgagccccaaggactacttcgcccagctgcagggcagagagccccagggcagagagtggagcgccaccgccctgaagagaagcatgatcagcgaggccatgctgggctacgccaccctgaacggcaagaccgtgagagacgacgacggcgcccccctggtgagagccgagcccatcctgaccagagagcagctggaggccctgagagccgagctggtgaagaccagcagagccaagcccgccgtgagcacccccagcctgctgctgagagtgctgttctgcgccgtgtgcggcgagcccgcctacaagttcgccggcggcggcagaaagcaccccagatacagatgcagaagcatgggcttccccaagcactgcggcaacggcaccgtggccatggccgagtgggacgccttctgcgaggagcaggtgctggacctgctgggcgacgccgagagactggagaaggtgtgggtggccggcagcgacagcgccgtggagctggccgaggtgaacgccgagctggtggacctgaccagcctgatcggcagccccgcctacagagccggcagcccccagagagaggccctggacgccagaatcgccgccctggccgccagacaggaggagctggagggcctggaggccagacccagcggctgggagtggagagagaccggccagagattcggcgactggtggagagagcaggacaccgccgccaagaacacctggctgagaagcatgaacgtgagactgaccttcgacgtgagaggcggcctgaccagaaccatcgacttcggcgacctgcaggagtacgagcagcacctgagactgggcagcgtggtggagagactgcacaccggcatgagctga

SEQ ID NO: 627 - protein, 2660 aa, synthetic construct
MKRTADGSEFESPKKKRKVDKKYSIGLDIGTNSVGWAVITDEYKVPSKKFKVLGNTDRHSIKKNLIGALLFDSGETAEATRLKRTARRRYTRRKNRICYLQEIFSNEMAKVDDSFFHRLEESFLVEEDKKHERHPIFGNIVDEVAYHEKYPTIYHLRKKLVDSTDKADLRLIYLALAHMIKFRGHFLIEGDLNPDNSDVDKLFIQLVQTYNQLFEENPINASGVDAKAILSARLSKSRRLENLIAQLPGEKKNGLFGNLIALSLGLTPNFKSNFDLAEDAKLQLSKDTYDDDLDNLLAQIGDQYADLFLAAKNLSDAILLSDILRVNTEITKAPLSASMIKRYDEHHQDLTLLKALVRQQLPEKYKEIFFDQSKNGYAGYIDGGASQEEFYKFIKPILEKMDGTEELLVKLNREDLLRKQRTFDNGSIPHQIHLGELHAILRRQEDFYPFLKDNREKIEKILTFRIPYYVGPLARGNSRFAWMTRKSEETITPWNFEEVVDKGASAQSFIERMTNFDKNLPNEKVLPKHSLLYEYFTVYNELTKVKYVTEGMRKPAFLSGEQKKAIVDLLFKTNRKVTVKQLKEDYFKKIECFDSVEISGVEDRFNASLGTYHDLLKIIKDKDFLDNEENEDILEDIVLTLTLFEDREMIEERLKTYAHLFDDKVMKQLKRRRYTGWGRLSRKLINGIRDKQSGKTILDFLKSDGFANRNFMQLIHDDSLTFKEDIQKAQVSGQGDSLHEHIANLAGSPAIKKGILQTVKVVDELVKVMGRHKPENIVIEMARENQTTQKGQKNSRERMKRIEEGIKELGSQILKEHPVENTQLQNEKLYLYYLQNGRDMYVDQELDINRLSDYDVDAIVPQSFLKDDSIDNKVLTRSDKNRGKSDNVPSEEVVKKMKNYWRQLLNAKLITQRKFDNLTKAERGGLSELDKAGFIKRQLVETRQITKHVAQILDSRMNTKYDENDKLIREVKVITLKSKLVSDFRKDFQFYKVREINNYHHAHDAYLNAVVGTALIKKYPKLESEFVYGDYKVYDVRKMIAKSEQEIGKATAKYFFYSNIMNFFKTEITLANGEIRKRPLIETNGETGEIVWDKGRDFATVRKVLSMPQVNIVKKTEVQTGGFSKESILPKRNSDKLIARKKDWDPKKYGGFDSPTVAYSVLVVAKVEKGKSKKLKSVKELLGITIMERSSFEKNPIDFLEAKGYKEVKKDLIIKLPKYSLFELENGRKRMLASAGELQKGNELALPSKYVNFLYLASHYEKLKGSPEDNEQKQLFVEQHKHYLDEIIEQISEFSKRVILADANLDKVLSAYNKHRDKPIREQAENIIHLFTLTNLGAPAAFKYFDTTIDRKRYTSTKEVLDATLIHQSITGLYETRIDLSQLGGDSGGSSGGSSGSETPGTSESATPESSGGSSGGSSTLNIEDEYRLHETSKEPDVSLGSTWLSDFPQAWAETGGMGLAVRQAPLIIPLKATSTPVSIKQYPMSQEARLGIKPHIQRLLDQGILVPCQSPWNTPLLPVKKPGTNDYRPVQDLREVNKRVEDIHPTVPNPYNLLSGLPPSHQWYTVLDLKDAFFCLRLHPTSQPLFAFEWRDPEMGISGQLTWTRLPQGFKNSPTLFNEALHRDLADFRIQHPDLILLQYVDDLLLAATSELDCQQGTRALLQTLGNLGYRASAKKAQICQKQVKYLGYLLKEGQRWLTEARKETVMGQPTPKTPRQLREFLGKAGFCRLFIPGFAEMAAPLYPLTKPGTLFNWGPDQQKAYQEIKQALLTAPALGLPDLTKPFELFVDEKQGYAKGVLTQKLGPWRRPVAYLSKKLDPVAAGWPPCLRMVAAIAVLTKDAGKLTMGQPLVILAPHAVEALVKQPPDRWLSNARMTHYQALLLDTDRVQFGPVVALNPATLLPLPEEGLQHNCLDILAEAHGTRPDLTDQPLPDADHTWYTDGSSLLQEGQRKAGAAVTTETEVIWAKALPAGTSAQRAELIALTQALKMAEGKKLNVYTDSRYAFATAHIHGEIYRRRGWLTSEGKEIKNKDEILALLKALFLPKRLSIIHCPGHQKGHSAEARGNRMADQAARKAAITETPDTSTLLIENSSPSGGSKRTADGSEFEPKKKRKVGSGATNFSLLKQAGDVEENPGPPAAKRVKLDGGSRALVVIRLSRVTDATTSPERQLESCQQLCAQRGWDVVGVAEDLDVSGAVDPFDRKRRPNLARWLAFEEQPFDVIVAYRVDRLTRSIRHLQQLVHWAEDHKKLVVSATEAHFDTTTPFAAVVIALMGTVAQMELEAIKERNRSAAHFNIRAGKYRGSLPPWGYLPTRVDGEWRLVPDPVQRERILEVYHRVVDNHEPLHLVAHDLNRRGVLSPKDYFAQLQGREPQGREWSATALKRSMISEAMLGYATLNGKTVRDDDGAPLVRAEPILTREQLEALRAELVKTSRAKPAVSTPSLLLRVLFCAVCGEPAYKFAGGGRKHPRYRCRSMGFPKHCGNGTVAMAEWDAFCEEQVLDLLGDAERLEKVWVAGSDSAVELAEVNAELVDLTSLIGSPAYRAGSPQREALDARIAALAARQEELEGLEARPSGWEWRETGQRFGDWWREQDTAAKNTWLRSMNVRLTFDVRGGLTRTIDFGDLQEYEQHLRLGSVVERLHTGMSGGSPKKKRKV

SEQ ID NO: 628 - DNA, 7983 bp, synthetic construct
  source 1..7983: mol_type = other DNA
atgaagagaaccgccgacggcagcgagttcgagagccccaagaagaagagaaaggtggacaagaagtacagcatcggcctggacatcggcaccaacagcgtgggctgggccgtgatcaccgacgagtacaaggtgcccagcaagaagttcaaggtgctgggcaacaccgacagacacagcatcaagaagaacctgatcggcgccctgctgttcgacagcggcgagaccgccgaggccaccagactgaagagaaccgccagaagaagatacaccagaagaaagaacagaatctgctacctgcaggagatcttcagcaacgagatggccaaggtggacgacagcttcttccacagactggaggagagcttcctggtggaggaggacaagaagcacgagagacaccccatcttcggcaacatcgtggacgaggtggcctaccacgagaagtaccccaccatctaccacctgagaaagaagctggtggacagcaccgacaaggccgacctgagactgatctacctggccctggcccacatgatcaagttcagaggccacttcctgatcgagggcgacctgaaccccgacaacagcgacgtggacaagctgttcatccagctggtgcagacctacaaccagctgttcgaggagaaccccatcaacgccagcggcgtggacgccaaggccatcctgagcgccagactgagcaagagcagaagactggagaacctgatcgcccagctgcccggcgagaagaagaacggcctgttcggcaacctgatcgccctgagcctgggcctgacccccaacttcaagagcaacttcgacctggccgaggacgccaagctgcagctgagcaaggacacctacgacgacgacctggacaacctgctggcccagatcggcgaccagtacgccgacctgttcctggccgccaagaacctgagcgacgccatcctgctgagcgacatcctgagagtgaacaccgagatcaccaaggcccccctgagcgccagcatgatcaagagatacgacgagcaccaccaggacctgaccctgctgaaggccctggtgagacagcagctgcccgagaagtacaaggagatcttcttcgaccagagcaagaacggctacgccggctacatcgacggcggcgccagccaggaggagttctacaagttcatcaagcccatcctggagaagatggacggcaccgaggagctgctggtgaagctgaacagagaggacctgctgagaaagcagagaaccttcgacaacggcagcatcccccaccagatccacctgggcgagctgcacgccatcctgagaagacaggaggacttctaccccttcctgaaggacaacagagagaagatcgagaagatcctgaccttcagaatcccctactacgtgggccccctggccagaggcaacagcagattcgcctggatgaccagaaagagcgaggagaccatcaccccctggaacttcgaggaggtggtggacaagggcgccagcgcccagagcttcatcgagagaatgaccaacttcgacaagaacctgcccaacgagaaggtgctgcccaagcacagcctgctgtacgagtacttcaccgtgtacaacgagctgaccaaggtgaagtacgtgaccgagggcatgagaaagcccgccttcctgagcggcgagcagaagaaggccatcgtggacctgctgttcaagaccaacagaaaggtgaccgtgaagcagctgaaggaggactacttcaagaagatcgagtgcttcgacagcgtggagatcagcggcgtggaggacagattcaacgccagcctgggcacctaccacgacctgctgaagatcatcaaggacaaggacttcctggacaacgaggagaacgaggacatcctggaggacatcgtgctgaccctgaccctgttcgaggacagagagatgatcgaggagagactgaagacctacgcccacctgttcgacgacaaggtgatgaagcagctgaagagaagaagatacaccggctggggcagactgagcagaaagctgatcaacggcatcagagacaagcagagcggcaagaccatcctggacttcctgaagagtgacggcttcgccaacagaaacttcatgcagctgatccacgacgacagcctgaccttcaaggaggacatccagaaggcccaggtgagcggccagggcgacagcctgcacgagcacatcgccaacctggccggcagccccgccatcaagaagggcatcctgcagaccgtgaaggtggtggacgagctggtgaaggtgatgggcagacacaagcccgagaacatcgtgatcgagatggccagagagaaccagaccacccagaagggccagaagaacagcagagagagaatgaagagaatcgaggagggcatcaaggagctgggcagccagatcctgaaggagcaccccgtggagaacacccagctgcagaacgagaagctgtacctgtactacctgcagaacggcagagacatgtacgtggaccaggagctggacatcaacagactgagcgactacgacgtggacgccatcgtgccccagagcttcctgaaggacgacagcatcgacaacaaggtgctgaccagaagcgacaagaacagaggcaagagcgacaacgtgcccagcgaggaggtggtgaagaagatgaagaactactggagacagctgctgaacgccaagctgatcacccagagaaagttcgacaacctgaccaaggccgagagaggcggcctgagcgagctggacaaggccggcttcatcaagagacagctggtggagaccagacagatcaccaagcacgtggcccagatcctggacagcagaatgaacaccaagtacgacgagaacgacaagctgatcagagaggtgaaggtgatcaccctgaagagtaagctggtgagcgacttcagaaaggacttccagttctacaaggtgagagagatcaacaactaccaccacgcccacgacgcctacctgaacgccgtggtgggcaccgccctgatcaagaagtaccccaagctggagagcgagttcgtgtacggcgactacaaggtgtacgacgtgagaaagatgatcgccaagagcgagcaggagatcggcaaggccaccgccaagtacttcttctacagcaacatcatgaacttcttcaagaccgagatcaccctggccaacggcgagatcagaaagagacccctgatcgagaccaacggcgagaccggcgagatcgtgtgggacaagggcagagacttcgccaccgtgagaaaggtgctgagcatgccccaggtgaacatcgtgaagaagaccgaggtgcagaccggcggcttcagcaaggagagcatcctgcccaagagaaacagcgacaagctgatcgccagaaagaaggactgggaccccaagaagtacggcggcttcgacagccccaccgtggcctacagcgtgctggtggtggccaaggtggagaagggcaagagcaagaagctgaagagtgtgaaggagctgctgggcatcaccatcatggagagaagcagcttcgagaagaaccccatcgacttcctggaggccaagggctacaaggaggtgaagaaggacctgatcatcaagctgcccaagtacagcctgttcgagctggagaacggcagaaagagaatgctggccagcgccggcgagctgcagaagggcaacgagctggccctgcccagcaagtacgtgaacttcctgtacctggccagccactacgagaagctgaagggcagccccgaggacaacgagcagaagcagctgttcgtggagcagcacaagcactacctggacgagatcatcgagcagatcagcgagttcagcaagagagtgatcctggccgacgccaacctggacaaggtgctgagcgcctacaacaagcacagagacaagcccatcagagagcaggccgagaacatcatccacctgttcaccctgaccaacctgggcgcccccgccgccttcaagtacttcgacaccaccatcgacagaaagagatacaccagcaccaaggaggtgctggacgccaccctgatccaccagagcatcaccggcctgtacgagaccagaatcgacctgagccagctgggcggcgacagcggcggcagcagcggcggcagcagcggcagcgagacccccggcaccagcgagagcgccacccccgagagcagcggcggcagcagcggcggcagcagcaccctgaacatcgaggacgagtacagactgcacgagaccagcaaggagcccgacgtgagcctgggcagcacctggctgagcgacttcccccaggcctgggccgagaccggcggcatgggcctggccgtgagacaggcccccctgatcatccccctgaaggccaccagcacccccgtgagcatcaagcagtaccccatgagccaggaggccagactgggcatcaagccccacatccagagactgctggaccagggcatcctggtgccctgccagagcccctggaacacccccctgctgcccgtgaagaagcccggcaccaacgactacagacccgtgcaggacctgagagaggtgaacaagagagtggaggacatccaccccaccgtgcccaacccctacaacctgctgagcggcctgccccccagccaccagtggtacaccgtgctggacctgaaggacgccttcttctgcctgagactgcaccccaccagccagcccctgttcgccttcgagtggagagaccccgagatgggcatcagcggccagctgacctggaccagactgccccagggcttcaagaacagccccaccctgttcaacgaggccctgcacagagacctggccgacttcagaatccagcaccccgacctgatcctgctgcagtacgtggacgacctgctgctggccgccaccagcgagctggactgccagcagggcaccagagccctgctgcagaccctgggcaacctgggctacagagccagcgccaagaaggcccagatctgccagaagcaggtgaagtacctgggctacctgctgaaggagggccagagatggctgaccgaggccagaaaggagaccgtgatgggccagcccacccccaagacccccagacagctgagagagttcctgggcaaggccggcttctgcagactgttcatccccggcttcgccgagatggccgcccccctgtaccccctgaccaagcccggcaccctgttcaactggggccccgaccagcagaaggcctaccaggagatcaagcaggccctgctgaccgcccccgccctgggcctgcccgacctgaccaagcccttcgagctgttcgtggacgagaagcagggctacgccaagggcgtgctgacccagaagctgggcccctggagaagacccgtggcctacctgagcaagaagctggaccccgtggccgccggctggcccccctgcctgagaatggtggccgccatcgccgtgctgaccaaggacgccggcaagctgaccatgggccagcccctggtgatcctggccccccacgccgtggaggccctggtgaagcagccccccgacagatggctgagcaacgccagaatgacccactaccaggccctgctgctggacaccgacagagtgcagttcggccccgtggtggccctgaaccccgccaccctgctgcccctgcccgaggagggcctgcagcacaactgcctggacatcctggccgaggcccacggcaccagacccgacctgaccgaccagcccctgcccgacgccgaccacacctggtacaccgacggcagcagcctgctgcaggagggccagagaaaggccggcgccgccgtgaccaccgagaccgaggtgatctgggccaaggccctgcccgccggcaccagcgcccagagagccgagctgatcgccctgacccaggccctgaagatggccgagggcaagaagctgaacgtgtacaccgacagcagatacgccttcgccaccgcccacatccacggcgagatctacagaagaagaggctggctgaccagcgagggcaaggagatcaagaacaaggacgagatcctggccctgctgaaggccctgttcctgcccaagagactgagcatcatccactgccccggccaccagaagggccacagcgccgaggccagaggcaacagaatggccgaccaggccgccagaaaggccgccatcaccgagacccccgacaccagcaccctgctgatcgagaacagcagccccagcggcggcagcaagagaaccgccgacggcagcgagttcgagcccaagaagaagagaaaggtgggcagcggcgccaccaacttcagcctgctgaagcaggccggcgacgtggaggagaaccccggcccccctgctgctaagagagtgaaactggatggcggcagcagagccctggtggtgatcagactgagcagagtgaccgacgccaccaccagccccgagagacagctggagagctgccagcagctgtgcgcccagagaggctgggacgtggtgggcgtggccgaggacctggacgtgagcggcgccgtggaccccttcgacagaaagagaagacccaacctggccagatggctggccttcgaggagcagcccttcgacgtgatcgtggcctacagagtggacagactgaccagaagcatcagacacctgcagcagctggtgcactgggccgaggaccacaagaagctggtggtgagcgccaccgaggcccacttcgacaccaccacccccttcgccgccgtggtgatcgccctgatgggcaccgtggcccagatggagctggaggccatcaaggagagaaacagaagcgccgcccacttcaacatcagagccggcaagtacagaggcagcctgcccccctggggctacctgcccaccagagtggacggcgagtggagactggtgcccgaccccgtgcagagagagagaatcctggaggtgtaccacagagtggtggacaaccacgagcccctgcacctggtggcccacgacctgaacagaagaggcgtgctgagccccaaggactacttcgcccagctgcagggcagagagccccagggcagagagtggagcgccaccgccctgaagagaagcatgatcagcgaggccatgctgggctacgccaccctgaacggcaagaccgtgagagacgacgacggcgcccccctggtgagagccgagcccatcctgaccagagagcagctggaggccctgagagccgagctggtgaagaccagcagagccaagcccgccgtgagcacccccagcctgctgctgagagtgctgttctgcgccgtgtgcggcgagcccgcctacaagttcgccggcggcggcagaaagcaccccagatacagatgcagaagcatgggcttccccaagcactgcggcaacggcaccgtggccatggccgagtgggacgccttctgcgaggagcaggtgctggacctgctgggcgacgccgagagactggagaaggtgtgggtggccggcagcgacagcgccgtggagctggccgaggtgaacgccgagctggtggacctgaccagcctgatcggcagccccgcctacagagccggcagcccccagagagaggccctggacgccagaatcgccgccctggccgccagacaggaggagctggagggcctggaggccagacccagcggctgggagtggagagagaccggccagagattcggcgactggtggagagagcaggacaccgccgccaagaacacctggctgagaagcatgaacgtgagactgaccttcgacgtgagaggcggcctgaccagaaccatcgacttcggcgacctgcaggagtacgagcagcacctgagactgggcagcgtggtggagagactgcacaccggcatgagcggcggcagccccaagaagaagagaaaggtgtga

SEQ ID NO: 629 - protein, 2675 aa, synthetic construct
MKRTADGSEFESPKKKRKVDKKYSIGLDIGTNSVGWAVITDEYKVPSKKFKVLGNTDRHSIKKNLIGALLFDSGETAEATRLKRTARRRYTRRKNRICYLQEIFSNEMAKVDDSFFHRLEESFLVEEDKKHERHPIFGNIVDEVAYHEKYPTIYHLRKKLVDSTDKADLRLIYLALAHMIKFRGHFLIEGDLNPDNSDVDKLFIQLVQTYNQLFEENPINASGVDAKAILSARLSKSRRLENLIAQLPGEKKNGLFGNLIALSLGLTPNFKSNFDLAEDAKLQLSKDTYDDDLDNLLAQIGDQYADLFLAAKNLSDAILLSDILRVNTEITKAPLSASMIKRYDEHHQDLTLLKALVRQQLPEKYKEIFFDQSKNGYAGYIDGGASQEEFYKFIKPILEKMDGTEELLVKLNREDLLRKQRTFDNGSIPHQIHLGELHAILRRQEDFYPFLKDNREKIEKILTFRIPYYVGPLARGNSRFAWMTRKSEETITPWNFEEVVDKGASAQSFIERMTNFDKNLPNEKVLPKHSLLYEYFTVYNELTKVKYVTEGMRKPAFLSGEQKKAIVDLLFKTNRKVTVKQLKEDYFKKIECFDSVEISGVEDRFNASLGTYHDLLKIIKDKDFLDNEENEDILEDIVLTLTLFEDREMIEERLKTYAHLFDDKVMKQLKRRRYTGWGRLSRKLINGIRDKQSGKTILDFLKSDGFANRNFMQLIHDDSLTFKEDIQKAQVSGQGDSLHEHIANLAGSPAIKKGILQTVKVVDELVKVMGRHKPENIVIEMARENQTTQKGQKNSRERMKRIEEGIKELGSQILKEHPVENTQLQNEKLYLYYLQNGRDMYVDQELDINRLSDYDVDAIVPQSFLKDDSIDNKVLTRSDKNRGKSDNVPSEEVVKKMKNYWRQLLNAKLITQRKFDNLTKAERGGLSELDKAGFIKRQLVETRQITKHVAQILDSRMNTKYDENDKLIREVKVITLKSKLVSDFRKDFQFYKVREINNYHHAHDAYLNAVVGTALIKKYPKLESEFVYGDYKVYDVRKMIAKSEQEIGKATAKYFFYSNIMNFFKTEITLANGEIRKRPLIETNGETGEIVWDKGRDFATVRKVLSMPQVNIVKKTEVQTGGFSKESILPKRNSDKLIARKKDWDPKKYGGFDSPTVAYSVLVVAKVEKGKSKKLKSVKELLGITIMERSSFEKNPIDFLEAKGYKEVKKDLIIKLPKYSLFELENGRKRMLASAGELQKGNELALPSKYVNFLYLASHYEKLKGSPEDNEQKQLFVEQHKHYLDEIIEQISEFSKRVILADANLDKVLSAYNKHRDKPIREQAENIIHLFTLTNLGAPAAFKYFDTTIDRKRYTSTKEVLDATLIHQSITGLYETRIDLSQLGGDSGGSSGGSSGSETPGTSESATPESSGGSSGGSSTLNIEDEYRLHETSKEPDVSLGSTWLSDFPQAWAETGGMGLAVRQAPLIIPLKATSTPVSIKQYPMSQEARLGIKPHIQRLLDQGILVPCQSPWNTPLLPVKKPGTNDYRPVQDLREVNKRVEDIHPTVPNPYNLLSGLPPSHQWYTVLDLKDAFFCLRLHPTSQPLFAFEWRDPEMGISGQLTWTRLPQGFKNSPTLFNEALHRDLADFRIQHPDLILLQYVDDLLLAATSELDCQQGTRALLQTLGNLGYRASAKKAQICQKQVKYLGYLLKEGQRWLTEARKETVMGQPTPKTPRQLREFLGKAGFCRLFIPGFAEMAAPLYPLTKPGTLFNWGPDQQKAYQEIKQALLTAPALGLPDLTKPFELFVDEKQGYAKGVLTQKLGPWRRPVAYLSKKLDPVAAGWPPCLRMVAAIAVLTKDAGKLTMGQPLVILAPHAVEALVKQPPDRWLSNARMTHYQALLLDTDRVQFGPVVALNPATLLPLPEEGLQHNCLDILAEAHGTRPDLTDQPLPDADHTWYTDGSSLLQEGQRKAGAAVTTETEVIWAKALPAGTSAQRAELIALTQALKMAEGKKLNVYTDSRYAFATAHIHGEIYRRRGWLTSEGKEIKNKDEILALLKALFLPKRLSIIHCPGHQKGHSAEARGNRMADQAARKAAITETPDTSTLLIENSSPSGGSKRTADGSEFEPKKKRKVGSGATNFSLLKQAGDVEENPGPPAAKRVKLDGGSKDKKSDGKDSQKKGSRALVVIRLSRVTDATTSPERQLESCQQLCAQRGWDVVGVAEDLDVSGAVDPFDRKRRPNLARWLAFEEQPFDVIVAYRVDRLTRSIRHLQQLVHWAEDHKKLVVSATEAHFDTTTPFAAVVIALMGTVAQMELEAIKERNRSAAHFNIRAGKYRGSLPPWGYLPTRVDGEWRLVPDPVQRERILEVYHRVVDNHEPLHLVAHDLNRRGVLSPKDYFAQLQGREPQGREWSATALKRSMISEAMLGYATLNGKTVRDDDGAPLVRAEPILTREQLEALRAELVKTSRAKPAVSTPSLLLRVLFCAVCGEPAYKFAGGGRKHPRYRCRSMGFPKHCGNGTVAMAEWDAFCEEQVLDLLGDAERLEKVWVAGSDSAVELAEVNAELVDLTSLIGSPAYRAGSPQREALDARIAALAARQEELEGLEARPSGWEWRETGQRFGDWWREQDTAAKNTWLRSMNVRLTFDVRGGLTRTIDFGDLQEYEQHLRLGSVVERLHTGMSGGSPKKKRKV

SEQ ID NO: 630 - DNA, 8028 bp, synthetic construct
  source 1..8028: mol_type = other DNA
atgaagagaaccgccgacggcagcgagttcgagagccccaagaagaagagaaaggtggacaagaagtacagcatcggcctggacatcggcaccaacagcgtgggctgggccgtgatcaccgacgagtacaaggtgcccagcaagaagttcaaggtgctgggcaacaccgacagacacagcatcaagaagaacctgatcggcgccctgctgttcgacagcggcgagaccgccgaggccaccagactgaagagaaccgccagaagaagatacaccagaagaaagaacagaatctgctacctgcaggagatcttcagcaacgagatggccaaggtggacgacagcttcttccacagactggaggagagcttcctggtggaggaggacaagaagcacgagagacaccccatcttcggcaacatcgtggacgaggtggcctaccacgagaagtaccccaccatctaccacctgagaaagaagctggtggacagcaccgacaaggccgacctgagactgatctacctggccctggcccacatgatcaagttcagaggccacttcctgatcgagggcgacctgaaccccgacaacagcgacgtggacaagctgttcatccagctggtgcagacctacaaccagctgttcgaggagaaccccatcaacgccagcggcgtggacgccaaggccatcctgagcgccagactgagcaagagcagaagactggagaacctgatcgcccagctgcccggcgagaagaagaacggcctgttcggcaacctgatcgccctgagcctgggcctgacccccaacttcaagagcaacttcgacctggccgaggacgccaagctgcagctgagcaaggacacctacgacgacgacctggacaacctgctggcccagatcggcgaccagtacgccgacctgttcctggccgccaagaacctgagcgacgccatcctgctgagcgacatcctgagagtgaacaccgagatcaccaaggcccccctgagcgccagcatgatcaagagatacgacgagcaccaccaggacctgaccctgctgaaggccctggtgagacagcagctgcccgagaagtacaaggagatcttcttcgaccagagcaagaacggctacgccggctacatcgacggcggcgccagccaggaggagttctacaagttcatcaagcccatcctggagaagatggacggcaccgaggagctgctggtgaagctgaacagagaggacctgctgagaaagcagagaaccttcgacaacggcagcatcccccaccagatccacctgggcgagctgcacgccatcctgagaagacaggaggacttctaccccttcctgaaggacaacagagagaagatcgagaagatcctgaccttcagaatcccctactacgtgggccccctggccagaggcaacagcagattcgcctggatgaccagaaagagcgaggagaccatcaccccctggaacttcgaggaggtggtggacaagggcgccagcgcccagagcttcatcgagagaatgaccaacttcgacaagaacctgcccaacgagaaggtgctgcccaagcacagcctgctgtacgagtacttcaccgtgtacaacgagctgaccaaggtgaagtacgtgaccgagggcatgagaaagcccgccttcctgagcggcgagcagaagaaggccatcgtggacctgctgttcaagaccaacagaaaggtgaccgtgaagcagctgaaggaggactacttcaagaagatcgagtgcttcgacagcgtggagatcagcggcgtggaggacagattcaacgccagcctgggcacctaccacgacctgctgaagatcatcaaggacaaggacttcctggacaacgaggagaacgaggacatcctggaggacatcgtgctgaccctgaccctgttcgaggacagagagatgatcgaggagagactgaagacctacgcccacctgttcgacgacaaggtgatgaagcagctgaagagaagaagatacaccggctggggcagactgagcagaaagctgatcaacggcatcagagacaagcagagcggcaagaccatcctggacttcctgaagagtgacggcttcgccaacagaaacttcatgcagctgatccacgacgacagcctgaccttcaaggaggacatccagaaggcccaggtgagcggccagggcgacagcctgcacgagcacatcgccaacctggccggcagccccgccatcaagaagggcatcctgcagaccgtgaaggtggtggacgagctggtgaaggtgatgggcagacacaagcccgagaacatcgtgatcgagatggccagagagaaccagaccacccagaagggccagaagaacagcagagagagaatgaagagaatcgaggagggcatcaaggagctgggcagccagatcctgaaggagcaccccgtggagaacacccagctgcagaacgagaagctgtacctgtactacctgcagaacggcagagacatgtacgtggaccaggagctggacatcaacagactgagcgactacgacgtggacgccatcgtgccccagagcttcctgaaggacgacagcatcgacaacaaggtgctgaccagaagcgacaagaacagaggcaagagcgacaacgtgcccagcgaggaggtggtgaagaagatgaagaactactggagacagctgctgaacgccaagctgatcacccagagaaagttcgacaacctgaccaaggccgagagaggcggcctgagcgagctggacaaggccggcttcatcaagagacagctggtggagaccagacagatcaccaagcacgtggcccagatcctggacagcagaatgaacaccaagtacgacgagaacgacaagctgatcagagaggtgaaggtgatcaccctgaagagtaagctggtgagcgacttcagaaaggacttccagttctacaaggtgagagagatcaacaactaccaccacgcccacgacgcctacctgaacgccgtggtgggcaccgccctgatcaagaagtaccccaagctggagagcgagttcgtgtacggcgactacaaggtgtacgacgtgagaaagatgatcgccaagagcgagcaggagatcggcaaggccaccgccaagtacttcttctacagcaacatcatgaacttcttcaagaccgagatcaccctggccaacggcgagatcagaaagagacccctgatcgagaccaacggcgagaccggcgagatcgtgtgggacaagggcagagacttcgccaccgtgagaaaggtgctgagcatgccccaggtgaacatcgtgaagaagaccgaggtgcagaccggcggcttcagcaaggagagcatcctgcccaagagaaacagcgacaagctgatcgccagaaagaaggactgggaccccaagaagtacggcggcttcgacagccccaccgtggcctacagcgtgctggtggtggccaaggtggagaagggcaagagcaagaagctgaagagtgtgaaggagctgctgggcatcaccatcatggagagaagcagcttcgagaagaaccccatcgacttcctggaggccaagggctacaaggaggtgaagaaggacctgatcatcaagctgcccaagtacagcctgttcgagctggagaacggcagaaagagaatgctggccagcgccggcgagctgcagaagggcaacgagctggccctgcccagcaagtacgtgaacttcctgtacctggccagccactacgagaagctgaagggcagccccgaggacaacgagcagaagcagctgttcgtggagcagcacaagcactacctggacgagatcatcgagcagatcagcgagttcagcaagagagtgatcctggccgacgccaacctggacaaggtgctgagcgcctacaacaagcacagagacaagcccatcagagagcaggccgagaacatcatccacctgttcaccctgaccaacctgggcgcccccgccgccttcaagtacttcgacaccaccatcgacagaaagagatacaccagcaccaaggaggtgctggacgccaccctgatccaccagagcatcaccggcctgtacgagaccagaatcgacctgagccagctgggcggcgacagcggcggcagcagcggcggcagcagcggcagcgagacccccggcaccagcgagagcgccacccccgagagcagcggcggcagcagcggcggcagcagcaccctgaacatcgaggacgagtacagactgcacgagaccagcaaggagcccgacgtgagcctgggcagcacctggctgagcgacttcccccaggcctgggccgagaccggcggcatgggcctggccgtgagacaggcccccctgatcatccccctgaaggccaccagcacccccgtgagcatcaagcagtaccccatgagccaggaggccagactgggcatcaagccccacatccagagactgctggaccagggcatcctggtgccctgccagagcccctggaacacccccctgctgcccgtgaagaagcccggcaccaacgactacagacccgtgcaggacctgagagaggtgaacaagagagtggaggacatccaccccaccgtgcccaacccctacaacctgctgagcggcctgccccccagccaccagtggtacaccgtgctggacctgaaggacgccttcttctgcctgagactgcaccccaccagccagcccctgttcgccttcgagtggagagaccccgagatgggcatcagcggccagctgacctggaccagactgccccagggcttcaagaacagccccaccctgttcaacgaggccctgcacagagacctggccgacttcagaatccagcaccccgacctgatcctgctgcagtacgtggacgacctgctgctggccgccaccagcgagctggactgccagcagggcaccagagccctgctgcagaccctgggcaacctgggctacagagccagcgccaagaaggcccagatctgccagaagcaggtgaagtacctgggctacctgctgaaggagggccagagatggctgaccgaggccagaaaggagaccgtgatgggccagcccacccccaagacccccagacagctgagagagttcctgggcaaggccggcttctgcagactgttcatccccggcttcgccgagatggccgcccccctgtaccccctgaccaagcccggcaccctgttcaactggggccccgaccagcagaaggcctaccaggagatcaagcaggccctgctgaccgcccccgccctgggcctgcccgacctgaccaagcccttcgagctgttcgtggacgagaagcagggctacgccaagggcgtgctgacccagaagctgggcccctggagaagacccgtggcctacctgagcaagaagctggaccccgtggccgccggctggcccccctgcctgagaatggtggccgccatcgccgtgctgaccaaggacgccggcaagctgaccatgggccagcccctggtgatcctggccccccacgccgtggaggccctggtgaagcagccccccgacagatggctgagcaacgccagaatgacccactaccaggccctgctgctggacaccgacagagtgcagttcggccccgtggtggccctgaaccccgccaccctgctgcccctgcccgaggagggcctgcagcacaactgcctggacatcctggccgaggcccacggcaccagacccgacctgaccgaccagcccctgcccgacgccgaccacacctggtacaccgacggcagcagcctgctgcaggagggccagagaaaggccggcgccgccgtgaccaccgagaccgaggtgatctgggccaaggccctgcccgccggcaccagcgcccagagagccgagctgatcgccctgacccaggccctgaagatggccgagggcaagaagctgaacgtgtacaccgacagcagatacgccttcgccaccgcccacatccacggcgagatctacagaagaagaggctggctgaccagcgagggcaaggagatcaagaacaaggacgagatcctggccctgctgaaggccctgttcctgcccaagagactgagcatcatccactgccccggccaccagaagggccacagcgccgaggccagaggcaacagaatggccgaccaggccgccagaaaggccgccatcaccgagacccccgacaccagcaccctgctgatcgagaacagcagccccagcggcggcagcaagagaaccgccgacggcagcgagttcgagcccaagaagaagagaaaggtgggcagcggcgccaccaacttcagcctgctgaagcaggccggcgacgtggaggagaaccccggcccccctgctgctaagagagtgaaactggatggcggcagcaaggacaagaaatccgatggcaaggacagccagaaaaaaggcagcagagccctggtggtgatcagactgagcagagtgaccgacgccaccaccagccccgagagacagctggagagctgccagcagctgtgcgcccagagaggctgggacgtggtgggcgtggccgaggacctggacgtgagcggcgccgtggaccccttcgacagaaagagaagacccaacctggccagatggctggccttcgaggagcagcccttcgacgtgatcgtggcctacagagtggacagactgaccagaagcatcagacacctgcagcagctggtgcactgggccgaggaccacaagaagctggtggtgagcgccaccgaggcccacttcgacaccaccacccccttcgccgccgtggtgatcgccctgatgggcaccgtggcccagatggagctggaggccatcaaggagagaaacagaagcgccgcccacttcaacatcagagccggcaagtacagaggcagcctgcccccctggggctacctgcccaccagagtggacggcgagtggagactggtgcccgaccccgtgcagagagagagaatcctggaggtgtaccacagagtggtggacaaccacgagcccctgcacctggtggcccacgacctgaacagaagaggcgtgctgagccccaaggactacttcgcccagctgcagggcagagagccccagggcagagagtggagcgccaccgccctgaagagaagcatgatcagcgaggccatgctgggctacgccaccctgaacggcaagaccgtgagagacgacgacggcgcccccctggtgagagccgagcccatcctgaccagagagcagctggaggccctgagagccgagctggtgaagaccagcagagccaagcccgccgtgagcacccccagcctgctgctgagagtgctgttctgcgccgtgtgcggcgagcccgcctacaagttcgccggcggcggcagaaagcaccccagatacagatgcagaagcatgggcttccccaagcactgcggcaacggcaccgtggccatggccgagtgggacgccttctgcgaggagcaggtgctggacctgctgggcgacgccgagagactggagaaggtgtgggtggccggcagcgacagcgccgtggagctggccgaggtgaacgccgagctggtggacctgaccagcctgatcggcagccccgcctacagagccggcagcccccagagagaggccctggacgccagaatcgccgccctggccgccagacaggaggagctggagggcctggaggccagacccagcggctgggagtggagagagaccggccagagattcggcgactggtggagagagcaggacaccgccgccaagaacacctggctgagaagcatgaacgtgagactgaccttcgacgtgagaggcggcctgaccagaaccatcgacttcggcgacctgcaggagtacgagcagcacctgagactgggcagcgtggtggagagactgcacaccggcatgagcggcggcagccccaagaagaagagaaaggtgtga

SEQ ID NO: 631 - protein, 2691 aa, synthetic construct
MKRTADGSEFESPKKKRKVDKKYSIGLDIGTNSVGWAVITDEYKVPSKKFKVLGNTDRHSIKKNLIGALLFDSGETAEATRLKRTARRRYTRRKNRICYLQEIFSNEMAKVDDSFFHRLEESFLVEEDKKHERHPIFGNIVDEVAYHEKYPTIYHLRKKLVDSTDKADLRLIYLALAHMIKFRGHFLIEGDLNPDNSDVDKLFIQLVQTYNQLFEENPINASGVDAKAILSARLSKSRRLENLIAQLPGEKKNGLFGNLIALSLGLTPNFKSNFDLAEDAKLQLSKDTYDDDLDNLLAQIGDQYADLFLAAKNLSDAILLSDILRVNTEITKAPLSASMIKRYDEHHQDLTLLKALVRQQLPEKYKEIFFDQSKNGYAGYIDGGASQEEFYKFIKPILEKMDGTEELLVKLNREDLLRKQRTFDNGSIPHQIHLGELHAILRRQEDFYPFLKDNREKIEKILTFRIPYYVGPLARGNSRFAWMTRKSEETITPWNFEEVVDKGASAQSFIERMTNFDKNLPNEKVLPKHSLLYEYFTVYNELTKVKYVTEGMRKPAFLSGEQKKAIVDLLFKTNRKVTVKQLKEDYFKKIECFDSVEISGVEDRFNASLGTYHDLLKIIKDKDFLDNEENEDILEDIVLTLTLFEDREMIEERLKTYAHLFDDKVMKQLKRRRYTGWGRLSRKLINGIRDKQSGKTILDFLKSDGFANRNFMQLIHDDSLTFKEDIQKAQVSGQGDSLHEHIANLAGSPAIKKGILQTVKVVDELVKVMGRHKPENIVIEMARENQTTQKGQKNSRERMKRIEEGIKELGSQILKEHPVENTQLQNEKLYLYYLQNGRDMYVDQELDINRLSDYDVDAIVPQSFLKDDSIDNKVLTRSDKNRGKSDNVPSEEVVKKMKNYWRQLLNAKLITQRKFDNLTKAERGGLSELDKAGFIKRQLVETRQITKHVAQILDSRMNTKYDENDKLIREVKVITLKSKLVSDFRKDFQFYKVREINNYHHAHDAYLNAVVGTALIKKYPKLESEFVYGDYKVYDVRKMIAKSEQEIGKATAKYFFYSNIMNFFKTEITLANGEIRKRPLIETNGETGEIVWDKGRDFATVRKVLSMPQVNIVKKTEVQTGGFSKESILPKRNSDKLIARKKDWDPKKYGGFDSPTVAYSVLVVAKVEKGKSKKLKSVKELLGITIMERSSFEKNPIDFLEAKGYKEVKKDLIIKLPKYSLFELENGRKRMLASAGELQKGNELALPSKYVNFLYLASHYEKLKGSPEDNEQKQLFVEQHKHYLDEIIEQISEFSKRVILADANLDKVLSAYNKHRDKPIREQAENIIHLFTLTNLGAPAAFKYFDTTIDRKRYTSTKEVLDATLIHQSITGLYETRIDLSQLGGDSGGSSGGSSGSETPGTSESATPESSGGSSGGSSTLNIEDEYRLHETSKEPDVSLGSTWLSDFPQAWAETGGMGLAVRQAPLIIPLKATSTPVSIKQYPMSQEARLGIKPHIQRLLDQGILVPCQSPWNTPLLPVKKPGTNDYRPVQDLREVNKRVEDIHPTVPNPYNLLSGLPPSHQWYTVLDLKDAFFCLRLHPTSQPLFAFEWRDPEMGISGQLTWTRLPQGFKNSPTLFNEALHRDLADFRIQHPDLILLQYVDDLLLAATSELDCQQGTRALLQTLGNLGYRASAKKAQICQKQVKYLGYLLKEGQRWLTEARKETVMGQPTPKTPRQLREFLGKAGFCRLFIPGFAEMAAPLYPLTKPGTLFNWGPDQQKAYQEIKQALLTAPALGLPDLTKPFELFVDEKQGYAKGVLTQKLGPWRRPVAYLSKKLDPVAAGWPPCLRMVAAIAVLTKDAGKLTMGQPLVILAPHAVEALVKQPPDRWLSNARMTHYQALLLDTDRVQFGPVVALNPATLLPLPEEGLQHNCLDILAEAHGTRPDLTDQPLPDADHTWYTDGSSLLQEGQRKAGAAVTTETEVIWAKALPAGTSAQRAELIALTQALKMAEGKKLNVYTDSRYAFATAHIHGEIYRRRGWLTSEGKEIKNKDEILALLKALFLPKRLSIIHCPGHQKGHSAEARGNRMADQAARKAAITETPDTSTLLIENSSPSGGSKRTADGSEFEPKKKRKVGGSKDKKSDGKDSQKKGSGATNFSLLKQAGDVEENPGPPAAKRVKLDGGSKDKKSDGKDSQKKGSRALVVIRLSRVTDATTSPERQLESCQQLCAQRGWDVVGVAEDLDVSGAVDPFDRKRRPNLARWLAFEEQPFDVIVAYRVDRLTRSIRHLQQLVHWAEDHKKLVVSATEAHFDTTTPFAAVVIALMGTVAQMELEAIKERNRSAAHFNIRAGKYRGSLPPWGYLPTRVDGEWRLVPDPVQRERILEVYHRVVDNHEPLHLVAHDLNRRGVLSPKDYFAQLQGREPQGREWSATALKRSMISEAMLGYATLNGKTVRDDDGAPLVRAEPILTREQLEALRAELVKTSRAKPAVSTPSLLLRVLFCAVCGEPAYKFAGGGRKHPRYRCRSMGFPKHCGNGTVAMAEWDAFCEEQVLDLLGDAERLEKVWVAGSDSAVELAEVNAELVDLTSLIGSPAYRAGSPQREALDARIAALAARQEELEGLEARPSGWEWRETGQRFGDWWREQDTAAKNTWLRSMNVRLTFDVRGGLTRTIDFGDLQEYEQHLRLGSVVERLHTGMSGGSPKKKRKV

SEQ ID NO: 632 - DNA, 8076 bp, synthetic construct
  source 1..8076: mol_type = other DNA
atgaagagaaccgccgacggcagcgagttcgagagccccaagaagaagagaaaggtggacaagaagtacagcatcggcctggacatcggcaccaacagcgtgggctgggccgtgatcaccgacgagtacaaggtgcccagcaagaagttcaaggtgctgggcaacaccgacagacacagcatcaagaagaacctgatcggcgccctgctgttcgacagcggcgagaccgccgaggccaccagactgaagagaaccgccagaagaagatacaccagaagaaagaacagaatctgctacctgcaggagatcttcagcaacgagatggccaaggtggacgacagcttcttccacagactggaggagagcttcctggtggaggaggacaagaagcacgagagacaccccatcttcggcaacatcgtggacgaggtggcctaccacgagaagtaccccaccatctaccacctgagaaagaagctggtggacagcaccgacaaggccgacctgagactgatctacctggccctggcccacatgatcaagttcagaggccacttcctgatcgagggcgacctgaaccccgacaacagcgacgtggacaagctgttcatccagctggtgcagacctacaaccagctgttcgaggagaaccccatcaacgccagcggcgtggacgccaaggccatcctgagcgccagactgagcaagagcagaagactggagaacctgatcgcccagctgcccggcgagaagaagaacggcctgttcggcaacctgatcgccctgagcctgggcctgacccccaacttcaagagcaacttcgacctggccgaggacgccaagctgcagctgagcaaggacacctacgacgacgacctggacaacctgctggcccagatcggcgaccagtacgccgacctgttcctggccgccaagaacctgagcgacgccatcctgctgagcgacatcctgagagtgaacaccgagatcaccaaggcccccctgagcgccagcatgatcaagagatacgacgagcaccaccaggacctgaccctgctgaaggccctggtgagacagcagctgcccgagaagtacaaggagatcttcttcgaccagagcaagaacggctacgccggctacatcgacggcggcgccagccaggaggagttctacaagttcatcaagcccatcctggagaagatggacggcaccgaggagctgctggtgaagctgaacagagaggacctgctgagaaagcagagaaccttcgacaacggcagcatcccccaccagatccacctgggcgagctgcacgccatcctgagaagacaggaggacttctaccccttcctgaaggacaacagagagaagatcgagaagatcctgaccttcagaatcccctactacgtgggccccctggccagaggcaacagcagattcgcctggatgaccagaaagagcgaggagaccatcaccccctggaacttcgaggaggtggtggacaagggcgccagcgcccagagcttcatcgagagaatgaccaacttcgacaagaacctgcccaacgagaaggtgctgcccaagcacagcctgctgtacgagtacttcaccgtgtacaacgagctgaccaaggtgaagtacgtgaccgagggcatgagaaagcccgccttcctgagcggcgagcagaagaaggccatcgtggacctgctgttcaagaccaacagaaaggtgaccgtgaagcagctgaaggaggactacttcaagaagatcgagtgcttcgacagcgtggagatcagcggcgtggaggacagattcaacgccagcctgggcacctaccacgacctgctgaagatcatcaaggacaaggacttcctggacaacgaggagaacgaggacatcctggaggacatcgtgctgaccctgaccctgttcgaggacagagagatgatcgaggagagactgaagacctacgcccacctgttcgacgacaaggtgatgaagcagctgaagagaagaagatacaccggctggggcagactgagcagaaagctgatcaacggcatcagagacaagcagagcggcaagaccatcctggacttcctgaagagtgacggcttcgccaacagaaacttcatgcagctgatccacgacgacagcctgaccttcaaggaggacatccagaaggcccaggtgagcggccagggcgacagcctgcacgagcacatcgccaacctggccggcagccccgccatcaagaagggcatcctgcagaccgtgaaggtggtggacgagctggtgaaggtgatgggcagacacaagcccgagaacatcgtgatcgagatggccagagagaaccagaccacccagaagggccagaagaacagcagagagagaatgaagagaatcgaggagggcatcaaggagctgggcagccagatcctgaaggagcaccccgtggagaacacccagctgcagaacgagaagctgtacctgtactacctgcagaacggcagagacatgtacgtggaccaggagctggacatcaacagactgagcgactacgacgtggacgccatcgtgccccagagcttcctgaaggacgacagcatcgacaacaaggtgctgaccagaagcgacaagaacagaggcaagagcgacaacgtgcccagcgaggaggtggtgaagaagatgaagaactactggagacagctgctgaacgccaagctgatcacccagagaaagttcgacaacctgaccaaggccgagagaggcggcctgagcgagctggacaaggccggcttcatcaagagacagctggtggagaccagacagatcaccaagcacgtggcccagatcctggacagcagaatgaacaccaagtacgacgagaacgacaagctgatcagagaggtgaaggtgatcaccctgaagagtaagctggtgagcgacttcagaaaggacttccagttctacaaggtgagagagatcaacaactaccaccacgcccacgacgcctacctgaacgccgtggtgggcaccgccctgatcaagaagtaccccaagctggagagcgagttcgtgtacggcgactacaaggtgtacgacgtgagaaagatgatcgccaagagcgagcaggagatcggcaaggccaccgccaagtacttcttctacagcaacatcatgaacttcttcaagaccgagatcaccctggccaacggcgagatcagaaagagacccctgatcgagaccaacggcgagaccggcgagatcgtgtgggacaagggcagagacttcgccaccgtgagaaaggtgctgagcatgccccaggtgaacatcgtgaagaagaccgaggtgcagaccggcggcttcagcaaggagagcatcctgcccaagagaaacagcgacaagctgatcgccagaaagaaggactgggaccccaagaagtacggcggcttcgacagccccaccgtggcctacagcgtgctggtggtggccaaggtggagaagggcaagagcaagaagctgaagagtgtgaaggagctgctgggcatcaccatcatggagagaagcagcttcgagaagaaccccatcgacttcctggaggccaagggctacaaggaggtgaagaaggacctgatcatcaagctgcccaagtacagcctgttcgagctggagaacggcagaaagagaatgctggccagcgccggcgagctgcagaagggcaacgagctggccctgcccagcaagtacgtgaacttcctgtacctggccagccactacgagaagctgaagggcagccccgaggacaacgagcagaagcagctgttcgtggagcagcacaagcactacctggacgagatcatcgagcagatcagcgagttcagcaagagagtgatcctggccgacgccaacctggacaaggtgctgagcgcctacaacaagcacagagacaagcccatcagagagcaggccgagaacatcatccacctgttcaccctgaccaacctgggcgcccccgccgccttcaagtacttcgacaccaccatcgacagaaagagatacaccagcaccaaggaggtgctggacgccaccctgatccaccagagcatcaccggcctgtacgagaccagaatcgacctgagccagctgggcggcgacagcggcggcagcagcggcggcagcagcggcagcgagacccccggcaccagcgagagcgccacccccgagagcagcggcggcagcagcggcggcagcagcaccctgaacatcgaggacgagtacagactgcacgagaccagcaaggagcccgacgtgagcctgggcagcacctggctgagcgacttcccccaggcctgggccgagaccggcggcatgggcctggccgtgagacaggcccccctgatcatccccctgaaggccaccagcacccccgtgagcatcaagcagtaccccatgagccaggaggccagactgggcatcaagccccacatccagagactgctggaccagggcatcctggtgccctgccagagcccctggaacacccccctgctgcccgtgaagaagcccggcaccaacgactacagacccgtgcaggacctgagagaggtgaacaagagagtggaggacatccaccccaccgtgcccaacccctacaacctgctgagcggcctgccccccagccaccagtggtacaccgtgctggacctgaaggacgccttcttctgcctgagactgcaccccaccagccagcccctgttcgccttcgagtggagagaccccgagatgggcatcagcggccagctgacctggaccagactgccccagggcttcaagaacagccccaccctgttcaacgaggccctgcacagagacctggccgacttcagaatccagcaccccgacctgatcctgctgcagtacgtggacgacctgctgctggccgccaccagcgagctggactgccagcagggcaccagagccctgctgcagaccctgggcaacctgggctacagagccagcgccaagaaggcccagatctgccagaagcaggtgaagtacctgggctacctgctgaaggagggccagagatggctgaccgaggccagaaaggagaccgtgatgggccagcccacccccaagacccccagacagctgagagagttcctgggcaaggccggcttctgcagactgttcatccccggcttcgccgagatggccgcccccctgtaccccctgaccaagcccggcaccctgttcaactggggccccgaccagcagaaggcctaccaggagatcaagcaggccctgctgaccgcccccgccctgggcctgcccgacctgaccaagcccttcgagctgttcgtggacgagaagcagggctacgccaagggcgtgctgacccagaagctgggcccctggagaagacccgtggcctacctgagcaagaagctggaccccgtggccgccggctggcccccctgcctgagaatggtggccgccatcgccgtgctgaccaaggacgccggcaagctgaccatgggccagcccctggtgatcctggccccccacgccgtggaggccctggtgaagcagccccccgacagatggctgagcaacgccagaatgacccactaccaggccctgctgctggacaccgacagagtgcagttcggccccgtggtggccctgaaccccgccaccctgctgcccctgcccgaggagggcctgcagcacaactgcctggacatcctggccgaggcccacggcaccagacccgacctgaccgaccagcccctgcccgacgccgaccacacctggtacaccgacggcagcagcctgctgcaggagggccagagaaaggccggcgccgccgtgaccaccgagaccgaggtgatctgggccaaggccctgcccgccggcaccagcgcccagagagccgagctgatcgccctgacccaggccctgaagatggccgagggcaagaagctgaacgtgtacaccgacagcagatacgccttcgccaccgcccacatccacggcgagatctacagaagaagaggctggctgaccagcgagggcaaggagatcaagaacaaggacgagatcctggccctgctgaaggccctgttcctgcccaagagactgagcatcatccactgccccggccaccagaagggccacagcgccgaggccagaggcaacagaatggccgaccaggccgccagaaaggccgccatcaccgagacccccgacaccagcaccctgctgatcgagaacagcagccccagcggcggcagcaagagaaccgccgacggcagcgagttcgagcccaagaagaagagaaaggtgggcggcagcaaggacaaaaagagcgacggcaaggactcgcaaaaaaaaggcagcggcgccaccaacttcagcctgctgaagcaggccggcgacgtggaggagaaccccggcccccctgctgctaagagagtgaaactggatggcggcagcaaggacaagaaatccgatggcaaggacagccagaaaaaaggcagcagagccctggtggtgatcagactgagcagagtgaccgacgccaccaccagccccgagagacagctggagagctgccagcagctgtgcgcccagagaggctgggacgtggtgggcgtggccgaggacctggacgtgagcggcgccgtggaccccttcgacagaaagagaagacccaacctggccagatggctggccttcgaggagcagcccttcgacgtgatcgtggcctacagagtggacagactgaccagaagcatcagacacctgcagcagctggtgcactgggccgaggaccacaagaagctggtggtgagcgccaccgaggcccacttcgacaccaccacccccttcgccgccgtggtgatcgccctgatgggcaccgtggcccagatggagctggaggccatcaaggagagaaacagaagcgccgcccacttcaacatcagagccggcaagtacagaggcagcctgcccccctggggctacctgcccaccagagtggacggcgagtggagactggtgcccgaccccgtgcagagagagagaatcctggaggtgtaccacagagtggtggacaaccacgagcccctgcacctggtggcccacgacctgaacagaagaggcgtgctgagccccaaggactacttcgcccagctgcagggcagagagccccagggcagagagtggagcgccaccgccctgaagagaagcatgatcagcgaggccatgctgggctacgccaccctgaacggcaagaccgtgagagacgacgacggcgcccccctggtgagagccgagcccatcctgaccagagagcagctggaggccctgagagccgagctggtgaagaccagcagagccaagcccgccgtgagcacccccagcctgctgctgagagtgctgttctgcgccgtgtgcggcgagcccgcctacaagttcgccggcggcggcagaaagcaccccagatacagatgcagaagcatgggcttccccaagcactgcggcaacggcaccgtggccatggccgagtgggacgccttctgcgaggagcaggtgctggacctgctgggcgacgccgagagactggagaaggtgtgggtggccggcagcgacagcgccgtggagctggccgaggtgaacgccgagctggtggacctgaccagcctgatcggcagccccgcctacagagccggcagcccccagagagaggccctggacgccagaatcgccgccctggccgccagacaggaggagctggagggcctggaggccagacccagcggctgggagtggagagagaccggccagagattcggcgactggtggagagagcaggacaccgccgccaagaacacctggctgagaagcatgaacgtgagactgaccttcgacgtgagaggcggcctgaccagaaccatcgacttcggcgacctgcaggagtacgagcagcacctgagactgggcagcgtggtggagagactgcacaccggcatgagcggcggcagccccaagaagaagagaaaggtgtga

SEQ ID NO: 633 - protein, 2660 aa, synthetic construct
MPAAKRVKLDGGSRALVVIRLSRVTDATTSPERQLESCQQLCAQRGWDVVGVAEDLDVSGAVDPFDRKRRPNLARWLAFEEQPFDVIVAYRVDRLTRSIRHLQQLVHWAEDHKKLVVSATEAHFDTTTPFAAVVIALMGTVAQMELEAIKERNRSAAHFNIRAGKYRGSLPPWGYLPTRVDGEWRLVPDPVQRERILEVYHRVVDNHEPLHLVAHDLNRRGVLSPKDYFAQLQGREPQGREWSATALKRSMISEAMLGYATLNGKTVRDDDGAPLVRAEPILTREQLEALRAELVKTSRAKPAVSTPSLLLRVLFCAVCGEPAYKFAGGGRKHPRYRCRSMGFPKHCGNGTVAMAEWDAFCEEQVLDLLGDAERLEKVWVAGSDSAVELAEVNAELVDLTSLIGSPAYRAGSPQREALDARIAALAARQEELEGLEARPSGWEWRETGQRFGDWWREQDTAAKNTWLRSMNVRLTFDVRGGLTRTIDFGDLQEYEQHLRLGSVVERLHTGMSGGSPKKKRKVGSGATNFSLLKQAGDVEENPGPKRTADGSEFESPKKKRKVDKKYSIGLDIGTNSVGWAVITDEYKVPSKKFKVLGNTDRHSIKKNLIGALLFDSGETAEATRLKRTARRRYTRRKNRICYLQEIFSNEMAKVDDSFFHRLEESFLVEEDKKHERHPIFGNIVDEVAYHEKYPTIYHLRKKLVDSTDKADLRLIYLALAHMIKFRGHFLIEGDLNPDNSDVDKLFIQLVQTYNQLFEENPINASGVDAKAILSARLSKSRRLENLIAQLPGEKKNGLFGNLIALSLGLTPNFKSNFDLAEDAKLQLSKDTYDDDLDNLLAQIGDQYADLFLAAKNLSDAILLSDILRVNTEITKAPLSASMIKRYDEHHQDLTLLKALVRQQLPEKYKEIFFDQSKNGYAGYIDGGASQEEFYKFIKPILEKMDGTEELLVKLNREDLLRKQRTFDNGSIPHQIHLGELHAILRRQEDFYPFLKDNREKIEKILTFRIPYYVGPLARGNSRFAWMTRKSEETITPWNFEEVVDKGASAQSFIERMTNFDKNLPNEKVLPKHSLLYEYFTVYNELTKVKYVTEGMRKPAFLSGEQKKAIVDLLFKTNRKVTVKQLKEDYFKKIECFDSVEISGVEDRFNASLGTYHDLLKIIKDKDFLDNEENEDILEDIVLTLTLFEDREMIEERLKTYAHLFDDKVMKQLKRRRYTGWGRLSRKLINGIRDKQSGKTILDFLKSDGFANRNFMQLIHDDSLTFKEDIQKAQVSGQGDSLHEHIANLAGSPAIKKGILQTVKVVDELVKVMGRHKPENIVIEMARENQTTQKGQKNSRERMKRIEEGIKELGSQILKEHPVENTQLQNEKLYLYYLQNGRDMYVDQELDINRLSDYDVDAIVPQSFLKDDSIDNKVLTRSDKNRGKSDNVPSEEVVKKMKNYWRQLLNAKLITQRKFDNLTKAERGGLSELDKAGFIKRQLVETRQITKHVAQILDSRMNTKYDENDKLIREVKVITLKSKLVSDFRKDFQFYKVREINNYHHAHDAYLNAVVGTALIKKYPKLESEFVYGDYKVYDVRKMIAKSEQEIGKATAKYFFYSNIMNFFKTEITLANGEIRKRPLIETNGETGEIVWDKGRDFATVRKVLSMPQVNIVKKTEVQTGGFSKESILPKRNSDKLIARKKDWDPKKYGGFDSPTVAYSVLVVAKVEKGKSKKLKSVKELLGITIMERSSFEKNPIDFLEAKGYKEVKKDLIIKLPKYSLFELENGRKRMLASAGELQKGNELALPSKYVNFLYLASHYEKLKGSPEDNEQKQLFVEQHKHYLDEIIEQISEFSKRVILADANLDKVLSAYNKHRDKPIREQAENIIHLFTLTNLGAPAAFKYFDTTIDRKRYTSTKEVLDATLIHQSITGLYETRIDLSQLGGDSGGSSGGSSGSETPGTSESATPESSGGSSGGSSTLNIEDEYRLHETSKEPDVSLGSTWLSDFPQAWAETGGMGLAVRQAPLIIPLKATSTPVSIKQYPMSQEARLGIKPHIQRLLDQGILVPCQSPWNTPLLPVKKPGTNDYRPVQDLREVNKRVEDIHPTVPNPYNLLSGLPPSHQWYTVLDLKDAFFCLRLHPTSQPLFAFEWRDPEMGISGQLTWTRLPQGFKNSPTLFNEALHRDLADFRIQHPDLILLQYVDDLLLAATSELDCQQGTRALLQTLGNLGYRASAKKAQICQKQVKYLGYLLKEGQRWLTEARKETVMGQPTPKTPRQLREFLGKAGFCRLFIPGFAEMAAPLYPLTKPGTLFNWGPDQQKAYQEIKQALLTAPALGLPDLTKPFELFVDEKQGYAKGVLTQKLGPWRRPVAYLSKKLDPVAAGWPPCLRMVAAIAVLTKDAGKLTMGQPLVILAPHAVEALVKQPPDRWLSNARMTHYQALLLDTDRVQFGPVVALNPATLLPLPEEGLQHNCLDILAEAHGTRPDLTDQPLPDADHTWYTDGSSLLQEGQRKAGAAVTTETEVIWAKALPAGTSAQRAELIALTQALKMAEGKKLNVYTDSRYAFATAHIHGEIYRRRGWLTSEGKEIKNKDEILALLKALFLPKRLSIIHCPGHQKGHSAEARGNRMADQAARKAAITETPDTSTLLIENSSPSGGSKRTADGSEFEPKKKRKV

SEQ ID NO: 634 - DNA, 7983 bp, synthetic construct
  source 1..7983: mol_type = other DNA
atgcctgctgctaagagagtgaaactggatggcggcagcagagccctggtggtgatcagactgagcagagtgaccgacgccaccaccagccccgagagacagctggagagctgccagcagctgtgcgcccagagaggctgggacgtggtgggcgtggccgaggacctggacgtgagcggcgccgtggaccccttcgacagaaagagaagacccaacctggccagatggctggccttcgaggagcagcccttcgacgtgatcgtggcctacagagtggacagactgaccagaagcatcagacacctgcagcagctggtgcactgggccgaggaccacaagaagctggtggtgagcgccaccgaggcccacttcgacaccaccacccccttcgccgccgtggtgatcgccctgatgggcaccgtggcccagatggagctggaggccatcaaggagagaaacagaagcgccgcccacttcaacatcagagccggcaagtacagaggcagcctgcccccctggggctacctgcccaccagagtggacggcgagtggagactggtgcccgaccccgtgcagagagagagaatcctggaggtgtaccacagagtggtggacaaccacgagcccctgcacctggtggcccacgacctgaacagaagaggcgtgctgagccccaaggactacttcgcccagctgcagggcagagagccccagggcagagagtggagcgccaccgccctgaagagaagcatgatcagcgaggccatgctgggctacgccaccctgaacggcaagaccgtgagagacgacgacggcgcccccctggtgagagccgagcccatcctgaccagagagcagctggaggccctgagagccgagctggtgaagaccagcagagccaagcccgccgtgagcacccccagcctgctgctgagagtgctgttctgcgccgtgtgcggcgagcccgcctacaagttcgccggcggcggcagaaagcaccccagatacagatgcagaagcatgggcttccccaagcactgcggcaacggcaccgtggccatggccgagtgggacgccttctgcgaggagcaggtgctggacctgctgggcgacgccgagagactggagaaggtgtgggtggccggcagcgacagcgccgtggagctggccgaggtgaacgccgagctggtggacctgaccagcctgatcggcagccccgcctacagagccggcagcccccagagagaggccctggacgccagaatcgccgccctggccgccagacaggaggagctggagggcctggaggccagacccagcggctgggagtggagagagaccggccagagattcggcgactggtggagagagcaggacaccgccgccaagaacacctggctgagaagcatgaacgtgagactgaccttcgacgtgagaggcggcctgaccagaaccatcgacttcggcgacctgcaggagtacgagcagcacctgagactgggcagcgtggtggagagactgcacaccggcatgagcggcggcagccccaagaagaagagaaaggtgggcagcggcgccaccaacttcagcctgctgaagcaggccggcgacgtggaggagaaccccggccccaagagaaccgccgacggcagcgagttcgagagccccaagaagaagagaaaggtggacaagaagtacagcatcggcctggacatcggcaccaacagcgtgggctgggccgtgatcaccgacgagtacaaggtgcccagcaagaagttcaaggtgctgggcaacaccgacagacacagcatcaagaagaacctgatcggcgccctgctgttcgacagcggcgagaccgccgaggccaccagactgaagagaaccgccagaagaagatacaccagaagaaagaacagaatctgctacctgcaggagatcttcagcaacgagatggccaaggtggacgacagcttcttccacagactggaggagagcttcctggtggaggaggacaagaagcacgagagacaccccatcttcggcaacatcgtggacgaggtggcctaccacgagaagtaccccaccatctaccacctgagaaagaagctggtggacagcaccgacaaggccgacctgagactgatctacctggccctggcccacatgatcaagttcagaggccacttcctgatcgagggcgacctgaaccccgacaacagcgacgtggacaagctgttcatccagctggtgcagacctacaaccagctgttcgaggagaaccccatcaacgccagcggcgtggacgccaaggccatcctgagcgccagactgagcaagagcagaagactggagaacctgatcgcccagctgcccggcgagaagaagaacggcctgttcggcaacctgatcgccctgagcctgggcctgacccccaacttcaagagcaacttcgacctggccgaggacgccaagctgcagctgagcaaggacacctacgacgacgacctggacaacctgctggcccagatcggcgaccagtacgccgacctgttcctggccgccaagaacctgagcgacgccatcctgctgagcgacatcctgagagtgaacaccgagatcaccaaggcccccctgagcgccagcatgatcaagagatacgacgagcaccaccaggacctgaccctgctgaaggccctggtgagacagcagctgcccgagaagtacaaggagatcttcttcgaccagagcaagaacggctacgccggctacatcgacggcggcgccagccaggaggagttctacaagttcatcaagcccatcctggagaagatggacggcaccgaggagctgctggtgaagctgaacagagaggacctgctgagaaagcagagaaccttcgacaacggcagcatcccccaccagatccacctgggcgagctgcacgccatcctgagaagacaggaggacttctaccccttcctgaaggacaacagagagaagatcgagaagatcctgaccttcagaatcccctactacgtgggccccctggccagaggcaacagcagattcgcctggatgaccagaaagagcgaggagaccatcaccccctggaacttcgaggaggtggtggacaagggcgccagcgcccagagcttcatcgagagaatgaccaacttcgacaagaacctgcccaacgagaaggtgctgcccaagcacagcctgctgtacgagtacttcaccgtgtacaacgagctgaccaaggtgaagtacgtgaccgagggcatgagaaagcccgccttcctgagcggcgagcagaagaaggccatcgtggacctgctgttcaagaccaacagaaaggtgaccgtgaagcagctgaaggaggactacttcaagaagatcgagtgcttcgacagcgtggagatcagcggcgtggaggacagattcaacgccagcctgggcacctaccacgacctgctgaagatcatcaaggacaaggacttcctggacaacgaggagaacgaggacatcctggaggacatcgtgctgaccctgaccctgttcgaggacagagagatgatcgaggagagactgaagacctacgcccacctgttcgacgacaaggtgatgaagcagctgaagagaagaagatacaccggctggggcagactgagcagaaagctgatcaacggcatcagagacaagcagagcggcaagaccatcctggacttcctgaagagtgacggcttcgccaacagaaacttcatgcagctgatccacgacgacagcctgaccttcaaggaggacatccagaaggcccaggtgagcggccagggcgacagcctgcacgagcacatcgccaacctggccggcagccccgccatcaagaagggcatcctgcagaccgtgaaggtggtggacgagctggtgaaggtgatgggcagacacaagcccgagaacatcgtgatcgagatggccagagagaaccagaccacccagaagggccagaagaacagcagagagagaatgaagagaatcgaggagggcatcaaggagctgggcagccagatcctgaaggagcaccccgtggagaacacccagctgcagaacgagaagctgtacctgtactacctgcagaacggcagagacatgtacgtggaccaggagctggacatcaacagactgagcgactacgacgtggacgccatcgtgccccagagcttcctgaaggacgacagcatcgacaacaaggtgctgaccagaagcgacaagaacagaggcaagagcgacaacgtgcccagcgaggaggtggtgaagaagatgaagaactactggagacagctgctgaacgccaagctgatcacccagagaaagttcgacaacctgaccaaggccgagagaggcggcctgagcgagctggacaaggccggcttcatcaagagacagctggtggagaccagacagatcaccaagcacgtggcccagatcctggacagcagaatgaacaccaagtacgacgagaacgacaagctgatcagagaggtgaaggtgatcaccctgaagagtaagctggtgagcgacttcagaaaggacttccagttctacaaggtgagagagatcaacaactaccaccacgcccacgacgcctacctgaacgccgtggtgggcaccgccctgatcaagaagtaccccaagctggagagcgagttcgtgtacggcgactacaaggtgtacgacgtgagaaagatgatcgccaagagcgagcaggagatcggcaaggccaccgccaagtacttcttctacagcaacatcatgaacttcttcaagaccgagatcaccctggccaacggcgagatcagaaagagacccctgatcgagaccaacggcgagaccggcgagatcgtgtgggacaagggcagagacttcgccaccgtgagaaaggtgctgagcatgccccaggtgaacatcgtgaagaagaccgaggtgcagaccggcggcttcagcaaggagagcatcctgcccaagagaaacagcgacaagctgatcgccagaaagaaggactgggaccccaagaagtacggcggcttcgacagccccaccgtggcctacagcgtgctggtggtggccaaggtggagaagggcaagagcaagaagctgaagagtgtgaaggagctgctgggcatcaccatcatggagagaagcagcttcgagaagaaccccatcgacttcctggaggccaagggctacaaggaggtgaagaaggacctgatcatcaagctgcccaagtacagcctgttcgagctggagaacggcagaaagagaatgctggccagcgccggcgagctgcagaagggcaacgagctggccctgcccagcaagtacgtgaacttcctgtacctggccagccactacgagaagctgaagggcagccccgaggacaacgagcagaagcagctgttcgtggagcagcacaagcactacctggacgagatcatcgagcagatcagcgagttcagcaagagagtgatcctggccgacgccaacctggacaaggtgctgagcgcctacaacaagcacagagacaagcccatcagagagcaggccgagaacatcatccacctgttcaccctgaccaacctgggcgcccccgccgccttcaagtacttcgacaccaccatcgacagaaagagatacaccagcaccaaggaggtgctggacgccaccctgatccaccagagcatcaccggcctgtacgagaccagaatcgacctgagccagctgggcggcgacagcggcggcagcagcggcggcagcagcggcagcgagacccccggcaccagcgagagcgccacccccgagagcagcggcggcagcagcggcggcagcagcaccctgaacatcgaggacgagtacagactgcacgagaccagcaaggagcccgacgtgagcctgggcagcacctggctgagcgacttcccccaggcctgggccgagaccggcggcatgggcctggccgtgagacaggcccccctgatcatccccctgaaggccaccagcacccccgtgagcatcaagcagtaccccatgagccaggaggccagactgggcatcaagccccacatccagagactgctggaccagggcatcctggtgccctgccagagcccctggaacacccccctgctgcccgtgaagaagcccggcaccaacgactacagacccgtgcaggacctgagagaggtgaacaagagagtggaggacatccaccccaccgtgcccaacccctacaacctgctgagcggcctgccccccagccaccagtggtacaccgtgctggacctgaaggacgccttcttctgcctgagactgcaccccaccagccagcccctgttcgccttcgagtggagagaccccgagatgggcatcagcggccagctgacctggaccagactgccccagggcttcaagaacagccccaccctgttcaacgaggccctgcacagagacctggccgacttcagaatccagcaccccgacctgatcctgctgcagtacgtggacgacctgctgctggccgccaccagcgagctggactgccagcagggcaccagagccctgctgcagaccctgggcaacctgggctacagagccagcgccaagaaggcccagatctgccagaagcaggtgaagtacctgggctacctgctgaaggagggccagagatggctgaccgaggccagaaaggagaccgtgatgggccagcccacccccaagacccccagacagctgagagagttcctgggcaaggccggcttctgcagactgttcatccccggcttcgccgagatggccgcccccctgtaccccctgaccaagcccggcaccctgttcaactggggccccgaccagcagaaggcctaccaggagatcaagcaggccctgctgaccgcccccgccctgggcctgcccgacctgaccaagcccttcgagctgttcgtggacgagaagcagggctacgccaagggcgtgctgacccagaagctgggcccctggagaagacccgtggcctacctgagcaagaagctggaccccgtggccgccggctggcccccctgcctgagaatggtggccgccatcgccgtgctgaccaaggacgccggcaagctgaccatgggccagcccctggtgatcctggccccccacgccgtggaggccctggtgaagcagccccccgacagatggctgagcaacgccagaatgacccactaccaggccctgctgctggacaccgacagagtgcagttcggccccgtggtggccctgaaccccgccaccctgctgcccctgcccgaggagggcctgcagcacaactgcctggacatcctggccgaggcccacggcaccagacccgacctgaccgaccagcccctgcccgacgccgaccacacctggtacaccgacggcagcagcctgctgcaggagggccagagaaaggccggcgccgccgtgaccaccgagaccgaggtgatctgggccaaggccctgcccgccggcaccagcgcccagagagccgagctgatcgccctgacccaggccctgaagatggccgagggcaagaagctgaacgtgtacaccgacagcagatacgccttcgccaccgcccacatccacggcgagatctacagaagaagaggctggctgaccagcgagggcaaggagatcaagaacaaggacgagatcctggccctgctgaaggccctgttcctgcccaagagactgagcatcatccactgccccggccaccagaagggccacagcgccgaggccagaggcaacagaatggccgaccaggccgccagaaaggccgccatcaccgagacccccgacaccagcaccctgctgatcgagaacagcagccccagcggcggcagcaagagaaccgccgacggcagcgagttcgagcccaagaagaagagaaaggtgtga

SEQ ID NO: 635 - protein, 2660 aa, synthetic construct; identical to SEQ ID NO: 633

SEQ ID NO: 636 - DNA, 7983 bp, synthetic construct; identical to SEQ ID NO: 634
  source 1..7983: mol_type = other DNA

SEQ ID NO: 637 - protein, 2691 aa, synthetic construct
MPAAKRVKLDGGSKDKKSDGKDSQKKGSRALVVIRLSRVTDATTSPERQLESCQQLCAQRGWDVVGVAEDLDVSGAVDPFDRKRRPNLARWLAFEEQPFDVIVAYRVDRLTRSIRHLQQLVHWAEDHKKLVVSATEAHFDTTTPFAAVVIALMGTVAQMELEAIKERNRSAAHFNIRAGKYRGSLPPWGYLPTRVDGEWRLVPDPVQRERILEVYHRVVDNHEPLHLVAHDLNRRGVLSPKDYFAQLQGREPQGREWSATALKRSMISEAMLGYATLNGKTVRDDDGAPLVRAEPILTREQLEALRAELVKTSRAKPAVSTPSLLLRVLFCAVCGEPAYKFAGGGRKHPRYRCRSMGFPKHCGNGTVAMAEWDAFCEEQVLDLLGDAERLEKVWVAGSDSAVELAEVNAELVDLTSLIGSPAYRAGSPQREALDARIAALAARQEELEGLEARPSGWEWRETGQRFGDWWREQDTAAKNTWLRSMNVRLTFDVRGGLTRTIDFGDLQEYEQHLRLGSVVERLHTGMSGGSPKKKRKVGSGATNFSLLKQAGDVEENPGPKRTADGSEFESPKKKRKVDKKYSIGLDIGTNSVGWAVITDEYKVPSKKFKVLGNTDRHSIKKNLIGALLFDSGETAEATRLKRTARRRYTRRKNRICYLQEIFSNEMAKVDDSFFHRLEESFLVEEDKKHERHPIFGNIVDEVAYHEKYPTIYHLRKKLVDSTDKADLRLIYLALAHMIKFRGHFLIEGDLNPDNSDVDKLFIQLVQTYNQLFEENPINASGVDAKAILSARLSKSRRLENLIAQLPGEKKNGLFGNLIALSLGLTPNFKSNFDLAEDAKLQLSKDTYDDDLDNLLAQIGDQYADLFLAAKNLSDAILLSDILRVNTEITKAPLSASMIKRYDEHHQDLTLLKALVRQQLPEKYKEIFFDQSKNGYAGYIDGGASQEEFYKFIKPILEKMDGTEELLVKLNREDLLRKQRTFDNGSIPHQIHLGELHAILRRQEDFYPFLKDNREKIEKILTFRIPYYVGPLARGNSRFAWMTRKSEETITPWNFEEVVDKGASAQSFIERMTNFDKNLPNEKVLPKHSLLYEYFTVYNELTKVKYVTEGMRKPAFLSGEQKKAIVDLLFKTNRKVTVKQLKEDYFKKIECFDSVEISGVEDRFNASLGTYHDLLKIIKDKDFLDNEENEDILEDIVLTLTLFEDREMIEERLKTYAHLFDDKVMKQLKRRRYTGWGRLSRKLINGIRDKQSGKTILDFLKSDGFANRNFMQLIHDDSLTFKEDIQKAQVSGQGDSLHEHIANLAGSPAIKKGILQTVKVVDELVKVMGRHKPENIVIEMARENQTTQKGQKNSRERMKRIEEGIKELGSQILKEHPVENTQLQNEKLYLYYLQNGRDMYVDQELDINRLSDYDVDAIVPQSFLKDDSIDNKVLTRSDKNRGKSDNVPSEEVVKKMKNYWRQLLNAKLITQRKFDNLTKAERGGLSELDKAGFIKRQLVETRQITKHVAQILDSRMNTKYDENDKLIREVKVITLKSKLVSDFRKDFQFYKVREINNYHHAHDAYLNAVVGTALIKKYPKLESEFVYGDYKVYDVRKMIAKSEQEIGKATAKYFFYSNIMNFFKTEITLANGEIRKRPLIETNGETGEIVWDKGRDFATVRKVLSMPQVNIVKKTEVQTGGFSKESILPKRNSDKLIARKKDWDPKKYGGFDSPTVAYSVLVVAKVEKGKSKKLKSVKELLGITIMERSSFEKNPIDFLEAKGYKEVKKDLIIKLPKYSLFELENGRKRMLASAGELQKGNELALPSKYVNFLYLASHYEKLKGSPEDNEQKQLFVEQHKHYLDEIIEQISEFSKRVILADANLDKVLSAYNKHRDKPIREQAENIIHLFTLTNLGAPAAFKYFDTTIDRKRYTSTKEVLDATLIHQSITGLYETRIDLSQLGGDSGGSSGGSSGSETPGTSESATPESSGGSSGGSSTLNIEDEYRLHETSKEPDVSLGSTWLSDFPQAWAETGGMGLAVRQAPLIIPLKATSTPVSIKQYPMSQEARLGIKPHIQRLLDQGILVPCQSPWNTPLLPVKKPGTNDYRPVQDLREVNKRVEDIHPTVPNPYNLLSGLPPSHQWYTVLDLKDAFFCLRLHPTSQPLFAFEWRDPEMGISGQLTWTRLPQGFKNSPTLFNEALHRDLADFRIQHPDLILLQYVDDLLLAATSELDCQQGTRALLQTLGNLGYRASAKKAQICQKQVKYLGYLLKEGQRWLTEARKETVMGQPTPKTPRQLREFLGKAGFCRLFIPGFAEMAAPLYPLTKPGTLFNWGPDQQKAYQEIKQALLTAPALGLPDLTKPFELFVDEKQGYAKGVLTQKLGPWRRPVAYLSKKLDPVAAGWPPCLRMVAAIAVLTKDAGKLTMGQPLVILAPHAVEALVKQPPDRWLSNARMTHYQALLLDTDRVQFGPVVALNPATLLPLPEEGLQHNCLDILAEAHGTRPDLTDQPLPDADHTWYTDGSSLLQEGQRKAGAAVTTETEVIWAKALPAGTSAQRAELIALTQALKMAEGKKLNVYTDSRYAFATAHIHGEIYRRRGWLTSEGKEIKNKDEILALLKALFLPKRLSIIHCPGHQKGHSAEARGNRMADQAARKAAITETPDTSTLLIENSSPSGGSKRTADGSEFEPKKKRKVGGSKDKKSDGKDSQKK

SEQ ID NO: 638 - DNA, 8076 bp, synthetic construct
  source 1..8076: mol_type = other DNA
atgcctgctgctaagagagtgaaactggatggcggcagcaaggacaagaaatccgatggcaaggacagccagaaaaaaggcagcagagccctggtggtgatcagactgagcagagtgaccgacgccaccaccagccccgagagacagctggagagctgccagcagctgtgcgcccagagaggctgggacgtggtgggcgtggccgaggacctggacgtgagcggcgccgtggaccccttcgacagaaagagaagacccaacctggccagatggctggccttcgaggagcagcccttcgacgtgatcgtggcctacagagtggacagactgaccagaagcatcagacacctgcagcagctggtgcactgggccgaggaccacaagaagctggtggtgagcgccaccgaggcccacttcgacaccaccacccccttcgccgccgtggtgatcgccctgatgggcaccgtggcccagatggagctggaggccatcaaggagagaaacagaagcgccgcccacttcaacatcagagccggcaagtacagaggcagcctgcccccctggggctacctgcccaccagagtggacggcgagtggagactggtgcccgaccccgtgcagagagagagaatcctggaggtgtaccacagagtggtggacaaccacgagcccctgcacctggtggcccacgacctgaacagaagaggcgtgctgagccccaaggactacttcgcccagctgcagggcagagagccccagggcagagagtggagcgccaccgccctgaagagaagcatgatcagcgaggccatgctgggctacgccaccctgaacggcaagaccgtgagagacgacgacggcgcccccctggtgagagccgagcccatcctgaccagagagcagctggaggccctgagagccgagctggtgaagaccagcagagccaagcccgccgtgagcacccccagcctgctgctgagagtgctgttctgcgccgtgtgcggcgagcccgcctacaagttcgccggcggcggcagaaagcaccccagatacagatgcagaagcatgggcttccccaagcactgcggcaacggcaccgtggccatggccgagtgggacgccttctgcgaggagcaggtgctggacctgctgggcgacgccgagagactggagaaggtgtgggtggccggcagcgacagcgccgtggagctggccgaggtgaacgccgagctggtggacctgaccagcctgatcggcagccccgcctacagagccggcagcccccagagagaggccctggacgccagaatcgccgccctggccgccagacaggaggagctggagggcctggaggccagacccagcggctgggagtggagagagaccggccagagattcggcgactggtggagagagcaggacaccgccgccaagaacacctggctgagaagcatgaacgtgagactgaccttcgacgtgagaggcggcctgaccagaaccatcgacttcggcgacctgcaggagtacgagcagcacctgagactgggcagcgtggtggagagactgcacaccggcatgagcggcggcagccccaagaagaagagaaaggtgggcagcggcgccaccaacttcagcctgctgaagcaggccggcgacgtggaggagaaccccggccccaagagaaccgccgacggcagcgagttcgagagccccaagaagaagagaaaggtggacaagaagtacagcatcggcctggacatcggcaccaacagcgtgggctgggccgtgatcaccgacgagtacaaggtgcccagcaagaagttcaaggtgctgggcaacaccgacagacacagcatcaagaagaacctgatcggcgccctgctgttcgacagcggcgagaccgccgaggccaccagactgaagagaaccgccagaagaagatacaccagaagaaagaacagaatctgctacctgcaggagatcttcagcaacgagatggccaaggtggacgacagcttcttccacagactggaggagagcttcctggtggaggaggacaagaagcacgagagacaccccatcttcggcaacatcgtggacgaggtggcctaccacgagaagtaccccaccatctaccacctgagaaagaagctggtggacagcaccgacaaggccgacctgagactgatctacctggccctggcccacatgatcaagttcagaggccacttcctgatcgagggcgacctgaaccccgacaacagcgacgtggacaagctgttcatccagctggtgcagacctacaaccagctgttcgaggagaaccccatcaacgccagcggcgtggacgccaaggccatcctgagcgccagactgagcaagagcagaagactggagaacctgatcgcccagctgcccggcgagaagaagaacggcctgttcggcaacctgatcgccctgagcctgggcctgacccccaacttcaagagcaacttcgacctggccgaggacgccaagctgcagctgagcaaggacacctacgacgacgacctggacaacctgctggcccagatcggcgaccagtacgccgacctgttcctggccgccaagaacctgagcgacgccatcctgctgagcgacatcctgagagtgaacaccgagatcaccaaggcccccctgagcgccagcatgatcaagagatacgacgagcaccaccaggacctgaccctgctgaaggccctggtgagacagcagctgcccgagaagtacaaggagatcttcttcgaccagagcaagaacggctacgccggctacatcgacggcggcgccagccaggaggagttctacaagttcatcaagcccatcctggagaagatggacggcaccgaggagctgctggtgaagctgaacagagaggacctgctgagaaagcagagaaccttcgacaacggcagcatcccccaccagatccacctgggcgagctgcacgccatcctgagaagacaggaggacttctaccccttcctgaaggacaacagagagaagatcgagaagatcctgaccttcagaatcccctactacgtgggccccctggccagaggcaacagcagattcgcctggatgaccagaaagagcgaggagaccatcaccccctggaacttcgaggaggtggtggacaagggcgccagcgcccagagcttcatcgagagaatgaccaacttcgacaagaacctgcccaacgagaaggtgctgcccaagcacagcctgctgtacgagtacttcaccgtgtacaacgagctgaccaaggtgaagtacgtgaccgagggcatgagaaagcccgccttcctgagcggcgagcagaagaaggccatcgtggacctgctgttcaagaccaacagaaaggtgaccgtgaagcagctgaaggaggactacttcaagaagatcgagtgcttcgacagcgtggagatcagcggcgtggaggacagattcaacgccagcctgggcacctaccacgacctgctgaagatcatcaaggacaaggacttcctggacaacgaggagaacgaggacatcctggaggacatcgtgctgaccctgaccctgttcgaggacagagagatgatcgaggagagactgaagacctacgcccacctgttcgacgacaaggtgatgaagcagctgaagagaagaagatacaccggctggggcagactgagcagaaagctgatcaacggcatcagagacaagcagagcggcaagaccatcctggacttcctgaagagtgacggcttcgccaacagaaacttcatgcagctgatccacgacgacagcctgaccttcaaggaggacatccagaaggcccaggtgagcggccagggcgacagcctgcacgagcacatcgccaacctggccggcagccccgccatcaagaagggcatcctgcagaccgtgaaggtggtggacgagctggtgaaggtgatgggcagacacaagcccgagaacatcgtgatcgagatggccagagagaaccagaccacccagaagggccagaagaacagcagagagagaatgaagagaatcgaggagggcatcaaggagctgggcagccagatcctgaaggagcaccccgtggagaacacccagctgcagaacgagaagctgtacctgtactacctgcagaacggcagagacatgtacgtggaccaggagctggacatcaacagactgagcgactacgacgtggacgccatcgtgccccagagcttcctgaaggacgacagcatcgacaacaaggtgctgaccagaagcgacaagaacagaggcaagagcgacaacgtgcccagcgaggaggtggtgaagaagatgaagaactactggagacagctgctgaacgccaagctgatcacccagagaaagttcgacaacctgaccaaggccgagagaggcggcctgagcgagctggacaaggccggcttcatcaagagacagctggtggagaccagacagatcaccaagcacgtggcccagatcctggacagcagaatgaacaccaagtacgacgagaacgacaagctgatcagagaggtgaaggtgatcaccctgaagagtaagctggtgagcgacttcagaaaggacttccagttctacaaggtgagagagatcaacaactaccaccacgcccacgacgcctacctgaacgccgtggtgggcaccgccctgatcaagaagtaccccaagctggagagcgagttcgtgtacggcgactacaaggtgtacgacgtgagaaagatgatcgccaagagcgagcaggagatcggcaaggccaccgccaagtacttcttctacagcaacatcatgaacttcttcaagaccgagatcaccctggccaacggcgagatcagaaagagacccctgatcgagaccaacggcgagaccggcgagatcgtgtgggacaagggcagagacttcgccaccgtgagaaaggtgctgagcatgccccaggtgaacatcgtgaagaagaccgaggtgcagaccggcggcttcagcaaggagagcatcctgcccaagagaaacagcgacaagctgatcgccagaaagaaggactgggaccccaagaagtacggcggcttcgacagccccaccgtggcctacagcgtgctggtggtggccaaggtggagaagggcaagagcaagaagctgaagagtgtgaaggagctgctgggcatcaccatcatggagagaagcagcttcgagaagaaccccatcgacttcctggaggccaagggctacaaggaggtgaagaaggacctgatcatcaagctgcccaagtacagcctgttcgagctggagaacggcagaaagagaatgctggccagcgccggcgagctgcagaagggcaacgagctggccctgcccagcaagtacgtgaacttcctgtacctggccagccactacgagaagctgaagggcagccccgaggacaacgagcagaagcagctgttcgtggagcagcacaagcactacctggacgagatcatcgagcagatcagcgagttcagcaagagagtgatcctggccgacgccaacctggacaaggtgctgagcgcctacaacaagcacagagacaagcccatcagagagcaggccgagaacatcatccacctgttcaccctgaccaacctgggcgcccccgccgccttcaagtacttcgacaccaccatcgacagaaagagatacaccagcaccaaggaggtgctggacgccaccctgatccaccagagcatcaccggcctgtacgagaccagaatcgacctgagccagctgggcggcgacagcggcggcagcagcggcggcagcagcggcagcgagacccccggcaccagcgagagcgccacccccgagagcagcggcggcagcagcggcggcagcagcaccctgaacatcgaggacgagtacagactgcacgagaccagcaaggagcccgacgtgagcctgggcagcacctggctgagcgacttcccccaggcctgggccgagaccggcggcatgggcctggccgtgagacaggcccccctgatcatccccctgaaggccaccagcacccccgtgagcatcaagcagtaccccatgagccaggaggccagactgggcatcaagccccacatccagagactgctggaccagggcatcctggtgccctgccagagcccctggaacacccccctgctgcccgtgaagaagcccggcaccaacgactacagacccgtgcaggacctgagagaggtgaacaagagagtggaggacatccaccccaccgtgcccaacccctacaacctgctgagcggcctgccccccagccaccagtggtacaccgtgctggacctgaaggacgccttcttctgcctgagactgcaccccaccagccagcccctgttcgccttcgagtggagagaccccgagatgggcatcagcggccagctgacctggaccagactgccccagggcttcaagaacagccccaccctgttcaacgaggccctgcacagagacctggccgacttcagaatccagcaccccgacctgatcctgctgcagtacgtggacgacctgctgctggccgccaccagcgagctggactgccagcagggcaccagagccctgctgcagaccctgggcaacctgggctacagagccagcgccaagaaggcccagatctgccagaagcaggtgaagtacctgggctacctgctgaaggagggccagagatggctgaccgaggccagaaaggagaccgtgatgggccagcccacccccaagacccccagacagctgagagagttcctgggcaaggccggcttctgcagactgttcatccccggcttcgccgagatggccgcccccctgtaccccctgaccaagcccggcaccctgttcaactggggccccgaccagcagaaggcctaccaggagatcaagcaggccctgctgaccgcccccgccctgggcctgcccgacctgaccaagcccttcgagctgttcgtggacgagaagcagggctacgccaagggcgtgctgacccagaagctgggcccctggagaagacccgtggcctacctgagcaagaagctggaccccgtggccgccggctggcccccctgcctgagaatggtggccgccatcgccgtgctgaccaaggacgccggcaagctgaccatgggccagcccctggtgatcctggccccccacgccgtggaggccctggtgaagcagccccccgacagatggctgagcaacgccagaatgacccactaccaggccctgctgctggacaccgacagagtgcagttcggccccgtggtggccctgaaccccgccaccctgctgcccctgcccgaggagggcctgcagcacaactgcctggacatcctggccgaggcccacggcaccagacccgacctgaccgaccagcccctgcccgacgccgaccacacctggtacaccgacggcagcagcctgctgcaggagggccagagaaaggccggcgccgccgtgaccaccgagaccgaggtgatctgggccaaggccctgcccgccggcaccagcgcccagagagccgagctgatcgccctgacccaggccctgaagatggccgagggcaagaagctgaacgtgtacaccgacagcagatacgccttcgccaccgcccacatccacggcgagatctacagaagaagaggctggctgaccagcgagggcaaggagatcaagaacaaggacgagatcctggccctgctgaaggccctgttcctgcccaagagactgagcatcatccactgccccggccaccagaagggccacagcgccgaggccagaggcaacagaatggccgaccaggccgccagaaaggccgccatcaccgagacccccgacaccagcaccctgctgatcgagaacagcagccccagcggcggcagcaagagaaccgccgacggcagcgagttcgagcccaagaagaagagaaaggtgggcggcagcaaggacaaaaagagcgacggcaaggactcgcaaaaaaaatga

SEQ ID NO: 639 - protein, 2147 aa, synthetic construct
MKRTADGSEFESPKKKRKVDKKYSIGLDIGTNSVGWAVITDEYKVPSKKFKVLGNTDRHSIKKNLIGALLFDSGETAEATRLKRTARRRYTRRKNRICYLQEIFSNEMAKVDDSFFHRLEESFLVEEDKKHERHPIFGNIVDEVAYHEKYPTIYHLRKKLVDSTDKADLRLIYLALAHMIKFRGHFLIEGDLNPDNSDVDKLFIQLVQTYNQLFEENPINASGVDAKAILSARLSKSRRLENLIAQLPGEKKNGLFGNLIALSLGLTPNFKSNFDLAEDAKLQLSKDTYDDDLDNLLAQIGDQYADLFLAAKNLSDAILLSDILRVNTEITKAPLSASMIKRYDEHHQDLTLLKALVRQQLPEKYKEIFFDQSKNGYAGYIDGGASQEEFYKFIKPILEKMDGTEELLVKLNREDLLRKQRTFDNGSIPHQIHLGELHAILRRQEDFYPFLKDNREKIEKILTFRIPYYVGPLARGNSRFAWMTRKSEETITPWNFEEVVDKGASAQSFIERMTNFDKNLPNEKVLPKHSLLYEYFTVYNELTKVKYVTEGMRKPAFLSGEQKKAIVDLLFKTNRKVTVKQLKEDYFKKIECFDSVEISGVEDRFNASLGTYHDLLKIIKDKDFLDNEENEDILEDIVLTLTLFEDREMIEERLKTYAHLFDDKVMKQLKRRRYTGWGRLSRKLINGIRDKQSGKTILDFLKSDGFANRNFMQLIHDDSLTFKEDIQKAQVSGQGDSLHEHIANLAGSPAIKKGILQTVKVVDELVKVMGRHKPENIVIEMARENQTTQKGQKNSRERMKRIEEGIKELGSQILKEHPVENTQLQNEKLYLYYLQNGRDMYVDQELDINRLSDYDVDAIVPQSFLKDDSIDNKVLTRSDKNRGKSDNVPSEEVVKKMKNYWRQLLNAKLITQRKFDNLTKAERGGLSELDKAGFIKRQLVETRQITKHVAQILDSRMNTKYDENDKLIREVKVITLKSKLVSDFRKDFQFYKVREINNYHHAHDAYLNAVVGTALIKKYPKLESEFVYGDYKVYDVRKMIAKSEQEIGKATAKYFFYSNIMNFFKTEITLANGEIRKRPLIETNGETGEIVWDKGRDFATVRKVLSMPQVNIVKKTEVQTGGFSKESILPKRNSDKLIARKKDWDPKKYGGFDSPTVAYSVLVVAKVEKGKSKKLKSVKELLGITIMERSSFEKNPIDFLEAKGYKEVKKDLIIKLPKYSLFELENGRKRMLASAGELQKGNELALPSKYVNFLYLASHYEKLKGSPEDNEQKQLFVEQHKHYLDEIIEQISEFSKRVILADANLDKVLSAYNKHRDKPIREQAENIIHLFTLTNLGAPAAFKYFDTTIDRKRYTSTKEVLDATLIHQSITGLYETRIDLSQLGGDSGGSSGGSSGSETPGTSESATPESSGGSSGGSSTLNIEDEYRLHETSKEPDVSLGSTWLSDFPQAWAETGGMGLAVRQAPLIIPLKATSTPVSIKQYPMSQEARLGIKPHIQRLLDQGILVPCQSPWNTPLLPVKKPGTNDYRPVQDLREVNKRVEDIHPTVPNPYNLLSGLPPSHQWYTVLDLKDAFFCLRLHPTSQPLFAFEWRDPEMGISGQLTWTRLPQGFKNSPTLFNEALHRDLADFRIQHPDLILLQYVDDLLLAATSELDCQQGTRALLQTLGNLGYRASAKKAQICQKQVKYLGYLLKEGQRWLTEARKETVMGQPTPKTPRQLREFLGKAGFCRLFIPGFAEMAAPLYPLTKPGTLFNWGPDQQKAYQEIKQALLTAPALGLPDLTKPFELFVDEKQGYAKGVLTQKLGPWRRPVAYLSKKLDPVAAGWPPCLRMVAAIAVLTKDAGKLTMGQPLVILAPHAVEALVKQPPDRWLSNARMTHYQALLLDTDRVQFGPVVALNPATLLPLPEEGLQHNCLDILAEAHGTRPDLTDQPLPDADHTWYTDGSSLLQEGQRKAGAAVTTETEVIWAKALPAGTSAQRAELIALTQALKMAEGKKLNVYTDSRYAFATAHIHGEIYRRRGWLTSEGKEIKNKDEILALLKALFLPKRLSIIHCPGHQKGHSAEARGNRMADQAARKAAITETPDTSTLLIENSSPSGGSKRTADGSEFEPKKKRKVGGSVSGWRLFKKISGSGKDKKSDGKDSQKK

SEQ ID NO: 640 - DNA, 6444 bp, synthetic construct
  source 1..6444: mol_type = other DNA
atgaagagaaccgccgacggcagcgagttcgagagccccaagaagaagagaaaggtggacaagaagtacagcatcggcctggacatcggcaccaacagcgtgggctgggccgtgatcaccgacgagtacaaggtgcccagcaagaagttcaaggtgctgggcaacaccgacagacacagcatcaagaagaacctgatcggcgccctgctgttcgacagcggcgagaccgccgaggccaccagactgaagagaaccgccagaagaagatacaccagaagaaagaacagaatctgctacctgcaggagatcttcagcaacgagatggccaaggtggacgacagcttcttccacagactggaggagagcttcctggtggaggaggacaagaagcacgagagacaccccatcttcggcaacatcgtggacgaggtggcctaccacgagaagtaccccaccatctaccacctgagaaagaagctggtggacagcaccgacaaggccgacctgagactgatctacctggccctggcccacatgatcaagttcagaggccacttcctgatcgagggcgacctgaaccccgacaacagcgacgtggacaagctgttcatccagctggtgcagacctacaaccagctgttcgaggagaaccccatcaacgccagcggcgtggacgccaaggccatcctgagcgccagactgagcaagagcagaagactggagaacctgatcgcccagctgcccggcgagaagaagaacggcctgttcggcaacctgatcgccctgagcctgggcctgacccccaacttcaagagcaacttcgacctggccgaggacgccaagctgcagctgagcaaggacacctacgacgacgacctggacaacctgctggcccagatcggcgaccagtacgccgacctgttcctggccgccaagaacctgagcgacgccatcctgctgagcgacatcctgagagtgaacaccgagatcaccaaggcccccctgagcgccagcatgatcaagagatacgacgagcaccaccaggacctgaccctgctgaaggccctggtgagacagcagctgcccgagaagtacaaggagatcttcttcgaccagagcaagaacggctacgccggctacatcgacggcggcgccagccaggaggagttctacaagttcatcaagcccatcctggagaagatggacggcaccgaggagctgctggtgaagctgaacagagaggacctgctgagaaagcagagaaccttcgacaacggcagcatcccccaccagatccacctgggcgagctgcacgccatcctgagaagacaggaggacttctaccccttcctgaaggacaacagagagaagatcgagaagatcctgaccttcagaatcccctactacgtgggccccctggccagaggcaacagcagattcgcctggatgaccagaaagagcgaggagaccatcaccccctggaacttcgaggaggtggtggacaagggcgccagcgcccagagcttcatcgagagaatgaccaacttcgacaagaacctgcccaacgagaaggtgctgcccaagcacagcctgctgtacgagtacttcaccgtgtacaacgagctgaccaaggtgaagtacgtgaccgagggcatgagaaagcccgccttcctgagcggcgagcagaagaaggccatcgtggacctgctgttcaagaccaacagaaaggtgaccgtgaagcagctgaaggaggactacttcaagaagatcgagtgcttcgacagcgtggagatcagcggcgtggaggacagattcaacgccagcctgggcacctaccacgacctgctgaagatcatcaaggacaaggacttcctggacaacgaggagaacgaggacatcctggaggacatcgtgctgaccctgaccctgttcgaggacagagagatgatcgaggagagactgaagacctacgcccacctgttcgacgacaaggtgatgaagcagctgaagagaagaagatacaccggctggggcagactgagcagaaagctgatcaacggcatcagagacaagcagagcggcaagaccatcctggacttcctgaagagtgacggcttcgccaacagaaacttcatgcagctgatccacgacgacagcctgaccttcaaggaggacatccagaaggcccaggtgagcggccagggcgacagcctgcacgagcacatcgccaacctggccggcagccccgccatcaagaagggcatcctgcagaccgtgaaggtggtggacgagctggtgaaggtgatgggcagacacaagcccgagaacatcgtgatcgagatggccagagagaaccagaccacccagaagggccagaagaacagcagagagagaatgaagagaatcgaggagggcatcaaggagctgggcagccagatcctgaaggagcaccccgtggagaacacccagctgcagaacgagaagctgtacctgtactacctgcagaacggcagagacatgtacgtggaccaggagctggacatcaacagactgagcgactacgacgtggacgccatcgtgccccagagcttcctgaaggacgacagcatcgacaacaaggtgctgaccagaagcgacaagaacagaggcaagagcgacaacgtgcccagcgaggaggtggtgaagaagatgaagaactactggagacagctgctgaacgccaagctgatcacccagagaaagttcgacaacctgaccaaggccgagagaggcggcctgagcgagctggacaaggccggcttcatcaagagacagctggtggagaccagacagatcaccaagcacgtggcccagatcctggacagcagaatgaacaccaagtacgacgagaacgacaagctgatcagagaggtgaaggtgatcaccctgaagagtaagctggtgagcgacttcagaaaggacttccagttctacaaggtgagagagatcaacaactaccaccacgcccacgacgcctacctgaacgccgtggtgggcaccgccctgatcaagaagtaccccaagctggagagcgagttcgtgtacggcgactacaaggtgtacgacgtgagaaagatgatcgccaagagcgagcaggagatcggcaaggccaccgccaagtacttcttctacagcaacatcatgaacttcttcaagaccgagatcaccctggccaacggcgagatcagaaagagacccctgatcgagaccaacggcgagaccggcgagatcgtgtgggacaagggcagagacttcgccaccgtgagaaaggtgctgagcatgccccaggtgaacatcgtgaagaagaccgaggtgcagaccggcggcttcagcaaggagagcatcctgcccaagagaaacagcgacaagctgatcgccagaaagaaggactgggaccccaagaagtacggcggcttcgacagccccaccgtggcctacagcgtgctggtggtggccaaggtggagaagggcaagagcaagaagctgaagagtgtgaaggagctgctgggcatcaccatcatggagagaagcagcttcgagaagaaccccatcgacttcctggaggccaagggctacaaggaggtgaagaaggacctgatcatcaagctgcccaagtacagcctgttcgagctggagaacggcagaaagagaatgctggccagcgccggcgagctgcagaagggcaacgagctggccctgcccagcaagtacgtgaacttcctgtacctggccagccactacgagaagctgaagggcagccccgaggacaacgagcagaagcagctgttcgtggagcagcacaagcactacctggacgagatcatcgagcagatcagcgagttcagcaagagagtgatcctggccgacgccaacctggacaaggtgctgagcgcctacaacaagcacagagacaagcccatcagagagcaggccgagaacatcatccacctgttcaccctgaccaacctgggcgcccccgccgccttcaagtacttcgacaccaccatcgacagaaagagatacaccagcaccaaggaggtgctggacgccaccctgatccaccagagcatcaccggcctgtacgagaccagaatcgacctgagccagctgggcggcgacagcggcggcagcagcggcggcagcagcggcagcgagacccccggcaccagcgagagcgccacccccgagagcagcggcggcagcagcggcggcagcagcaccctgaacatcgaggacgagtacagactgcacgagaccagcaaggagcccgacgtgagcctgggcagcacctggctgagcgacttcccccaggcctgggccgagaccggcggcatgggcctggccgtgagacaggcccccctgatcatccccctgaaggccaccagcacccccgtgagcatcaagcagtaccccatgagccaggaggccagactgggcatcaagccccacatccagagactgctggaccagggcatcctggtgccctgccagagcccctggaacacccccctgctgcccgtgaagaagcccggcaccaacgactacagacccgtgcaggacctgagagaggtgaacaagagagtggaggacatccaccccaccgtgcccaacccctacaacctgctgagcggcctgccccccagccaccagtggtacaccgtgctggacctgaaggacgccttcttctgcctgagactgcaccccaccagccagcccctgttcgccttcgagtggagagaccccgagatgggcatcagcggccagctgacctggaccagactgccccagggcttcaagaacagccccaccctgttcaacgaggccctgcacagagacctggccgacttcagaatccagcaccccgacctgatcctgctgcagtacgtggacgacctgctgctggccgccaccagcgagctggactgccagcagggcaccagagccctgctgcagaccctgggcaacctgggctacagagccagcgccaagaaggcccagatctgccagaagcaggtgaagtacctgggctacctgctgaaggagggccagagatggctgaccgaggccagaaaggagaccgtgatgggccagcccacccccaagacccccagacagctgagagagttcctgggcaaggccggcttctgcagactgttcatccccggcttcgccgagatggccgcccccctgtaccccctgaccaagcccggcaccctgttcaactggggccccgaccagcagaaggcctaccaggagatcaagcaggccctgctgaccgcccccgccctgggcctgcccgacctgaccaagcccttcgagctgttcgtggacgagaagcagggctacgccaagggcgtgctgacccagaagctgggcccctggagaagacccgtggcctacctgagcaagaagctggaccccgtggccgccggctggcccccctgcctgagaatggtggccgccatcgccgtgctgaccaaggacgccggcaagctgaccatgggccagcccctggtgatcctggccccccacgccgtggaggccctggtgaagcagccccccgacagatggctgagcaacgccagaatgacccactaccaggccctgctgctggacaccgacagagtgcagttcggccccgtggtggccctgaaccccgccaccctgctgcccctgcccgaggagggcctgcagcacaactgcctggacatcctggccgaggcccacggcaccagacccgacctgaccgaccagcccctgcccgacgccgaccacacctggtacaccgacggcagcagcctgctgcaggagggccagagaaaggccggcgccgccgtgaccaccgagaccgaggtgatctgggccaaggccctgcccgccggcaccagcgcccagagagccgagctgatcgccctgacccaggccctgaagatggccgagggcaagaagctgaacgtgtacaccgacagcagatacgccttcgccaccgcccacatccacggcgagatctacagaagaagaggctggctgaccagcgagggcaaggagatcaagaacaaggacgagatcctggccctgctgaaggccctgttcctgcccaagagactgagcatcatccactgccccggccaccagaagggccacagcgccgaggccagaggcaacagaatggccgaccaggccgccagaaaggccgccatcaccgagacccccgacaccagcaccctgctgatcgagaacagcagccccagcggcggcagcaagagaaccgccgacggcagcgagttcgagcccaagaagaagagaaaggtgggcggcagcgtgagcggctggagactgttcaagaagatcagcggcagcggcaaggacaagaaatccgatggcaaggacagccagaaaaaatga

SEQ ID NO: 641 - protein, 2147 aa, synthetic construct; identical to SEQ ID NO: 639

SEQ ID NO: 642 - DNA, 6444 bp, synthetic construct; identical to SEQ ID NO: 640
  source 1..6444: mol_type = other DNA

SEQ ID NO: 643 - protein, 2133 aa, synthetic construct
MKRTADGSEFESPKKKRKVDKKYSIGLDIGTNSVGWAVITDEYKVPSKKFKVLGNTDRHSIKKNLIGALLFDSGETAEATRLKRTARRRYTRRKNRICYLQEIFSNEMAKVDDSFFHRLEESFLVEEDKKHERHPIFGNIVDEVAYHEKYPTIYHLRKKLVDSTDKADLRLIYLALAHMIKFRGHFLIEGDLNPDNSDVDKLFIQLVQTYNQLFEENPINASGVDAKAILSARLSKSRRLENLIAQLPGEKKNGLFGNLIALSLGLTPNFKSNFDLAEDAKLQLSKDTYDDDLDNLLAQIGDQYADLFLAAKNLSDAILLSDILRVNTEITKAPLSASMIKRYDEHHQDLTLLKALVRQQLPEKYKEIFFDQSKNGYAGYIDGGASQEEFYKFIKPILEKMDGTEELLVKLNREDLLRKQRTFDNGSIPHQIHLGELHAILRRQEDFYPFLKDNREKIEKILTFRIPYYVGPLARGNSRFAWMTRKSEETITPWNFEEVVDKGASAQSFIERMTNFDKNLPNEKVLPKHSLLYEYFTVYNELTKVKYVTEGMRKPAFLSGEQKKAIVDLLFKTNRKVTVKQLKEDYFKKIECFDSVEISGVEDRFNASLGTYHDLLKIIKDKDFLDNEENEDILEDIVLTLTLFEDREMIEERLKTYAHLFDDKVMKQLKRRRYTGWGRLSRKLINGIRDKQSGKTILDFLKSDGFANRNFMQLIHDDSLTFKEDIQKAQVSGQGDSLHEHIANLAGSPAIKKGILQTVKVVDELVKVMGRHKPENIVIEMARENQTTQKGQKNSRERMKRIEEGIKELGSQILKEHPVENTQLQNEKLYLYYLQNGRDMYVDQELDINRLSDYDVDAIVPQSFLKDDSIDNKVLTRSDKNRGKSDNVPSEEVVKKMKNYWRQLLNAKLITQRKFDNLTKAERGGLSELDKAGFIKRQLVETRQITKHVAQILDSRMNTKYDENDKLIREVKVITLKSKLVSDFRKDFQFYKVREINNYHHAHDAYLNAVVGTALIKKYPKLESEFVYGDYKVYDVRKMIAKSEQEIGKATAKYFFYSNIMNFFKTEITLANGEIRKRPLIETNGETGEIVWDKGRDFATVRKVLSMPQVNIVKKTEVQTGGFSKESILPKRNSDKLIARKKDWDPKKYGGFDSPTVAYSVLVVAKVEKGKSKKLKSVKELLGITIMERSSFEKNPIDFLEAKGYKEVKKDLIIKLPKYSLFELENGRKRMLASAGELQKGNELALPSKYVNFLYLASHYEKLKGSPEDNEQKQLFVEQHKHYLDEIIEQISEFSKRVILADANLDKVLSAYNKHRDKPIREQAENIIHLFTLTNLGAPAAFKYFDTTIDRKRYTSTKEVLDATLIHQSITGLYETRIDLSQLGGDSGGSSGGSSGSETPGTSESATPESSGGSSGGSSTLNIEDEYRLHETSKEPDVSLGSTWLSDFPQAWAETGGMGLAVRQAPLIIPLKATSTPVSIKQYPMSQEARLGIKPHIQRLLDQGILVPCQSPWNTPLLPVKKPGTNDYRPVQDLREVNKRVEDIHPTVPNPYNLLSGLPPSHQWYTVLDLKDAFFCLRLHPTSQPLFAFEWRDPEMGISGQLTWTRLPQGFKNSPTLFNEALHRDLADFRIQHPDLILLQYVDDLLLAATSELDCQQGTRALLQTLGNLGYRASAKKAQICQKQVKYLGYLLKEGQRWLTEARKETVMGQPTPKTPRQLREFLGKAGFCRLFIPGFAEMAAPLYPLTKPGTLFNWGPDQQKAYQEIKQALLTAPALGLPDLTKPFELFVDEKQGYAKGVLTQKLGPWRRPVAYLSKKLDPVAAGWPPCLRMVAAIAVLTKDAGKLTMGQPLVILAPHAVEALVKQPPDRWLSNARMTHYQALLLDTDRVQFGPVVALNPATLLPLPEEGLQHNCLDILAEAHGTRPDLTDQPLPDADHTWYTDGSSLLQEGQRKAGAAVTTETEVIWAKALPAGTSAQRAELIALTQALKMAEGKKLNVYTDSRYAFATAHIHGEIYRRRGWLTSEGKEIKNKDEILALLKALFLPKRLSIIHCPGHQKGHSAEARGNRMADQAARKAAITETPDTSTLLIENSSPSGGSKRTADGSEFEPKKKRKVGSGKDKKSDGKDSQKK

SEQ ID NO: 644 - DNA, 6402 bp, synthetic construct
  source 1..6402: mol_type = other DNA
atgaagagaaccgccgacggcagcgagttcgagagccccaagaagaagagaaaggtggacaagaagtacagcatcggcctggacatcggcaccaacagcgtgggctgggccgtgatcaccgacgagtacaaggtgcccagcaagaagttcaaggtgctgggcaacaccgacagacacagcatcaagaagaacctgatcggcgccctgctgttcgacagcggcgagaccgccgaggccaccagactgaagagaaccgccagaagaagatacaccagaagaaagaacagaatctgctacctgcaggagatcttcagcaacgagatggccaaggtggacgacagcttcttccacagactggaggagagcttcctggtggaggaggacaagaagcacgagagacaccccatcttcggcaacatcgtggacgaggtggcctaccacgagaagtaccccaccatctaccacctgagaaagaagctggtggacagcaccgacaaggccgacctgagactgatctacctggccctggcccacatgatcaagttcagaggccacttcctgatcgagggcgacctgaaccccgacaacagcgacgtggacaagctgttcatccagctggtgcagacctacaaccagctgttcgaggagaaccccatcaacgccagcggcgtggacgccaaggccatcctgagcgccagactgagcaagagcagaagactggagaacctgatcgcccagctgcccggcgagaagaagaacggcctgttcggcaacctgatcgccctgagcctgggcctgacccccaacttcaagagcaacttcgacctggccgaggacgccaagctgcagctgagcaaggacacctacgacgacgacctggacaacctgctggcccagatcggcgaccagtacgccgacctgttcctggccgccaagaacctgagcgacgccatcctgctgagcgacatcctgagagtgaacaccgagatcaccaaggcccccctgagcgccagcatgatcaagagatacgacgagcaccaccaggacctgaccctgctgaaggccctggtgagacagcagctgcccgagaagtacaaggagatcttcttcgaccagagcaagaacggctacgccggctacatcgacggcggcgccagccaggaggagttctacaagttcatcaagcccatcctggagaagatggacggcaccgaggagctgctggtgaagctgaacagagaggacctgctgagaaagcagagaaccttcgacaacggcagcatcccccaccagatccacctgggcgagctgcacgccatcctgagaagacaggaggacttctaccccttcctgaaggacaacagagagaagatcgagaagatcctgaccttcagaatcccctactacgtgggccccctggccagaggcaacagcagattcgcctggatgaccagaaagagcgaggagaccatcaccccctggaacttcgaggaggtggtggacaagggcgccagcgcccagagcttcatcgagagaatgaccaacttcgacaagaacctgcccaacgagaaggtgctgcccaagcacagcctgctgtacgagtacttcaccgtgtacaacgagctgaccaaggtgaagtacgtgaccgagggcatgagaaagcccgccttcctgagcggcgagcagaagaaggccatcgtggacctgctgttcaagaccaacagaaaggtgaccgtgaagcagctgaaggaggactacttcaagaagatcgagtgcttcgacagcgtggagatcagcggcgtggaggacagattcaacgccagcctgggcacctaccacgacctgctgaagatcatcaaggacaaggacttcctggacaacgaggagaacgaggacatcctggaggacatcgtgctgaccctgaccctgttcgaggacagagagatgatcgaggagagactgaagacctacgcccacctgttcgacgacaaggtgatgaagcagctgaagagaagaagatacaccggctggggcagactgagcagaaagctgatcaacggcatcagagacaagcagagcggcaagaccatcctggacttcctgaagagtgacggcttcgccaacagaaacttcatgcagctgatccacgacgacagcctgaccttcaaggaggacatccagaaggcccaggtgagcggccagggcgacagcctgcacgagcacatcgccaacctggccggcagccccgccatcaagaagggcatcctgcagaccgtgaaggtggtggacgagctggtgaaggtgatgggcagacacaagcccgagaacatcgtgatcgagatggccagagagaaccagaccacccagaagggccagaagaacagcagagagagaatgaagagaatcgaggagggcatcaaggagctgggcagccagatcctgaaggagcaccccgtggagaacacccagctgcagaacgagaagctgtacctgtactacctgcagaacggcagagacatgtacgtggaccaggagctggacatcaacagactgagcgactacgacgtggacgccatcgtgccccagagcttcctgaaggacgacagcatcgacaacaaggtgctgaccagaagcgacaagaacagaggcaagagcgacaacgtgcccagcgaggaggtggtgaagaagatgaagaactactggagacagctgctgaacgccaagctgatcacccagagaaagttcgacaacctgaccaaggccgagagaggcggcctgagcgagctggacaaggccggcttcatcaagagacagctggtggagaccagacagatcaccaagcacgtggcccagatcctggacagcagaatgaacaccaagtacgacgagaacgacaagctgatcagagaggtgaaggtgatcaccctgaagagtaagctggtgagcgacttcagaaaggacttccagttctacaaggtgagagagatcaacaactaccaccacgcccacgacgcctacctgaacgccgtggtgggcaccgccctgatcaagaagtaccccaagctggagagcgagttcgtgtacggcgactacaaggtgtacgacgtgagaaagatgatcgccaagagcgagcaggagatcggcaaggccaccgccaagtacttcttctacagcaacatcatgaacttcttcaagaccgagatcaccctggccaacggcgagatcagaaagagacccctgatcgagaccaacggcgagaccggcgagatcgtgtgggacaagggcagagacttcgccaccgtgagaaaggtgctgagcatgccccaggtgaacatcgtgaagaagaccgaggtgcagaccggcggcttcagcaaggagagcatcctgcccaagagaaacagcgacaagctgatcgccagaaagaaggactgggaccccaagaagtacggcggcttcgacagccccaccgtggcctacagcgtgctggtggtggccaaggtggagaagggcaagagcaagaagctgaagagtgtgaaggagctgctgggcatcaccatcatggagagaagcagcttcgagaagaaccccatcgacttcctggaggccaagggctacaaggaggtgaagaaggacctgatcatcaagctgcccaagtacagcctgttcgagctggagaacggcagaaagagaatgctggccagcgccggcgagctgcagaagggcaacgagctggccctgcccagcaagtacgtgaacttcctgtacctggccagccactacgagaagctgaagggcagccccgaggacaacgagcagaagcagctgttcgtggagcagcacaagcactacctggacgagatcatcgagcagatcagcgagttcagcaagagagtgatcctggccgacgccaacctggacaaggtgctgagcgcctacaacaagcacagagacaagcccatcagagagcaggccgagaacatcatccacctgttcaccctgaccaacctgggcgcccccgccgccttcaagtacttcgacaccaccatcgacagaaagagatacaccagcaccaaggaggtgctggacgccaccctgatccaccagagcatcaccggcctgtacgagaccagaatcgacctgagccagctgggcggcgacagcggcggcagcagcggcggcagcagcggcagcgagacccccggcaccagcgagagcgccacccccgagagcagcggcggcagcagcggcggcagcagcaccctgaacatcgaggacgagtacagactgcacgagaccagcaaggagcccgacgtgagcctgggcagcacctggctgagcgacttcccccaggcctgggccgagaccggcggcatgggcctggccgtgagacaggcccccctgatcatccccctgaaggccaccagcacccccgtgagcatcaagcagtaccccatgagccaggaggccagactgggcatcaagccccacatccagagactgctggaccagggcatcctggtgccctgccagagcccctggaacacccccctgctgcccgtgaagaagcccggcaccaacgactacagacccgtgcaggacctgagagaggtgaacaagagagtggaggacatccaccccaccgtgcccaacccctacaacctgctgagcggcctgccccccagccaccagtggtacaccgtgctggacctgaaggacgccttcttctgcctgagactgcaccccaccagccagcccctgttcgccttcgagtggagagaccccgagatgggcatcagcggccagctgacctggaccagactgccccagggcttcaagaacagccccaccctgttcaacgaggccctgcacagagacctggccgacttcagaatccagcaccccgacctgatcctgctgcagtacgtggacgacctgctgctggccgccaccagcgagctggactgccagcagggcaccagagccctgctgcagaccctgggcaacctgggctacagagccagcgccaagaaggcccagatctgccagaagcaggtgaagtacctgggctacctgctgaaggagggccagagatggctgaccgaggccagaaaggagaccgtgatgggccagcccacccccaagacccccagacagctgagagagttcctgggcaaggccggcttctgcagactgttcatccccggcttcgccgagatggccgcccccctgtaccccctgaccaagcccggcaccctgttcaactggggccccgaccagcagaaggcctaccaggagatcaagcaggccctgctgaccgcccccgccctgggcctgcccgacctgaccaagcccttcgagctgttcgtggacgagaagcagggctacgccaagggcgtgctgacccagaagctgggcccctggagaagacccgtggcctacctgagcaagaagctggaccccgtggccgccggctggcccccctgcctgagaatggtggccgccatcgccgtgctgaccaaggacgccggcaagctgaccatgggccagcccctggtgatcctggccccccacgccgtggaggccctggtgaagcagccccccgacagatggctgagcaacgccagaatgacccactaccaggccctgctgctggacaccgacagagtgcagttcggccccgtggtggccctgaaccccgccaccctgctgcccctgcccgaggagggcctgcagcacaactgcctggacatcctggccgaggcccacggcaccagacccgacctgaccgaccagcccctgcccgacgccgaccacacctggtacaccgacggcagcagcctgctgcaggagggccagagaaaggccggcgccgccgtgaccaccgagaccgaggtgatctgggccaaggccctgcccgccggcaccagcgcccagagagccgagctgatcgccctgacccaggccctgaagatggccgagggcaagaagctgaacgtgtacaccgacagcagatacgccttcgccaccgcccacatccacggcgagatctacagaagaagaggctggctgaccagcgagggcaaggagatcaagaacaaggacgagatcctggccctgctgaaggccctgttcctgcccaagagactgagcatcatccactgccccggccaccagaagggccacagcgccgaggccagaggcaacagaatggccgaccaggccgccagaaaggccgccatcaccgagacccccgacaccagcaccctgctgatcgagaacagcagccccagcggcggcagcaagagaaccgccgacggcagcgagttcgagcccaagaagaagagaaaggtgggcagcggcaaggacaagaaatccgatggcaaggacagccagaaaaaatga

SEQ ID NO: 645 - protein, 2133 aa, synthetic construct; identical to SEQ ID NO: 643

SEQ ID NO: 646 - DNA, 6402 bp, synthetic construct; identical to SEQ ID NO: 644
  source 1..6402: mol_type = other DNA

SEQ ID NO: 647 - DNA, 9991 bp, synthetic construct
  source 1..9991: mol_type = other DNA
aaaaaaaaaaaaaaaaaaaaaaaaaaaaaaaaaaaaaaaaaatgaagagcaggcctgcatgcaagcttctagcataaccccttggggcctctaaacgggtcttgaggggttttttgggtgtaatcatggtcatagctgtttcctgtgtgaacagcctggggctcaccttcgggtgggcctttctgcgggtgcctaatgagtgagctaactcacattaattgcgttgcgctcactgcccgctttccagtcgggaaacctgtcgtgccagctgcattaatgaatcggccaacgcgcggggagaggcggtttgcgtattgggcgccgaagaaaggcccacccgtgaaggtgagcctcttccgcttcctcgctcactgactcgctgcgctcggtcgttcggctgcggcgagcggtatcagctcactcaaaggcggtaatacggttatccacagaatcaggggataacgcaggaaagaacatgtgagcaaaaggccagcaaaaggccaggaaccgtaaaaaggccgcgttgctggcgtttttccataggctccgcccccctgacgagcatcacaaaaatcgacgctcaagtcagaggtggcgaaacccgacaggactataaagataccaggcgtttccccctggaagctccctcgtgcgctctcctgttccgaccctgccgcttaccggatacctgtccgcctttctcccttcgggaagcgtggcgctttctcatagctcacgctgtaggtatctcagttcggtgtaggtcgttcgctccaagctgggctgtgtgcacgaaccccccgttcagcccgaccgctgcgccttatccggtaactatcgtcttgagtccaacccggtaagacacgacttatcgccactggcagcagccactggtaacaggattagcagagcgaggtatgtaggcggtgctacagagttcttgaagtggtggcctaactacggctacactagaagaacagtatttggtatctgcgctctgctgaagccagttaccttcggaaaaagagttggtagctcttgatccggcaaacaaaccaccgctggtagcggtggtttttttgtttgcaagcagcagattacgcgcagaaaaaaaggatctcaagaagatcctttgatcttttctacggggtctgacgctcagtggaacgaaaactcacgttaagggattttggtcatgagattatcaaaaaggatcttcacctagatccttttaaattaaaaatgaagttttaaatcaagcccaatctgaataatgttacaaccaattaaccaattctgattagaaaaactcatcgagcatcaaatgaaactgcaatttattcatatcaggattatcaataccatatttttgaaaaagccgtttctgtaatgaaggagaaaactcaccgaggcagttccataggatggcaagatcctggtatcggtctgcgattccgactcgtccaacatcaatacaacctattaatttcccctcgtcaaaaataaggttatcaagtgagaaatcaccatgagtgacgactgaatccggtgagaatggcaaaagtttatgcatttctttccagacttgttcaacaggccagccattacgctcgtcatcaaaatcactcgcatcaaccaaaccgttattcattcgtgattgcgcctgagcgagacgaaatacgcgatcgctgttaaaaggacaattacaaacaggaatcgaatgcaaccggcgcaggaacactgccagcgcatcaacaatattttcacctgaatcaggatattcttctaatacctggaatgctgtttttccggggatcgcagtggtgagtaaccatgcatcatcaggagtacggataaaatgcttgatggtcggaagaggcataaattccgtcagccagtttagtctgaccatctcatctgtaacatcattggcaacgctacctttgccatgtttcagaaacaactctggcgcatcgggcttcccatacaagcgatagattgtcgcacctgattgcccgacattatcgcgagcccatttatacccatataaatcagcatccatgttggaatttaatcgcggcctcgacgtttcccgttgaatatggctcataacaccccttgtattactgtttatgtaagcagacagttttattgttcatgatgatatatttttatcttgtgcaatgtaacatcagagattttgagacacgggccagagctgcatcgcgcgtttcggtgatgacggtgaaaacctctgacacatgcagctcccggagacggtcacagcttgtctgtaagcggatgccgggagcagacaagcccgtcagggcgcgtcagcgggtgttggcgggtgtcggggctggcttaactatgcggcatcagagcagattgtactgagagtgcaccatatgcggtgtgaaataccgcacagatgcgtaaggagaaaataccgcatcaggcgccattcgccattcaggctgcgcaactgttgggaagggcgatcggtgcgggcctcttcgctattacgccagctggcgaaagggggatgtgctgcaaggcgattaagttgggtaacgccagggttttcccagtcacgacgttgtaaaacgacggccagagaattcgagctcggtacctaatacgactcactataaggaagctcagaataaacgctcaactttggccggatctgccaccatgaagagaaccgccgacggcagcgagttcgagagccccaagaagaagagaaaggtgctgaacatcgaggacgagtacagactgcacgagaccagcaaggagcccgacgtgagcctgggcagcacctggctgagcgacttcccccaggcctgggccgagaccggcggcatgggcctggccgtgagacaggcccccctgatcatccccctgaaggccaccagcacccccgtgagcatcaagcagtaccccatgagccaggaggccagactgggcatcaagccccacatccagagactgctggaccagggcatcctggtgccctgccagagcccctggaacacccccctgctgcccgtgaagaagcccggcaccaacgactacagacccgtgcaggacctgagagaggtgaacaagagagtggaggacatccaccccaccgtgcccaacccctacaacctgctgagcggcctgccccccagccaccagtggtacaccgtgctggacctgaaggacgccttcttctgcctgagactgcaccccaccagccagcccctgttcgccttcgagtggagagaccccgagatgggcatcagcggccagctgacctggaccagactgccccagggcttcaagaacagccccaccctgttcaacgaggccctgcacagagacctggccgacttcagaatccagcaccccgacctgatcctgctgcagtacgtggacgacctgctgctggccgccaccagcgagctggactgccagcagggcaccagagccctgctgcagaccctgggcaacctgggctacagagccagcgccaagaaggcccagatctgccagaagcaggtgaagtacctgggctacctgctgaaggagggccagagatggctgaccgaggccagaaaggagaccgtgatgggccagcccacccccaagacccccagacagctgagagagttcctgggcaaggccggcttctgcagactgttcatccccggcttcgccgagatggccgcccccctgtaccccctgaccaagcccggcaccctgttcaactggggccccgaccagcagaaggcctaccaggagatcaagcaggccctgctgaccgcccccgccctgggcctgcccgacctgaccaagcccttcgagctgttcgtggacgagaagcagggctacgccaagggcgtgctgacccagaagctgggcccctggagaagacccgtggcctacctgagcaagaagctggaccccgtggccgccggctggcccccctgcctgagaatggtggccgccatcgccgtgctgaccaaggacgccggcaagctgaccatgggccagcccctggtgatcctggccccccacgccgtggaggccctggtgaagcagccccccgacagatggctgagcaacgccagaatgacccactaccaggccctgctgctggacaccgacagagtgcagttcggccccgtggtggccctgaaccccgccaccctgctgcccctgcccgaggagggcctgcagcacaactgcctggacatcctggccgaggcccacggcaccagacccgacctgaccgaccagcccctgcccgacgccgaccacacctggtacaccgacggcagcagcctgctgcaggagggccagagaaaggccggcgccgccgtgaccaccgagaccgaggtgatctgggccaaggccctgcccgccggcaccagcgcccagagagccgagctgatcgccctgacccaggccctgaagatggccgagggcaagaagctgaacgtgtacaccgacagcagatacgccttcgccaccgcccacatccacggcgagatctacagaagaagaggctggctgaccagcgagggcaaggagatcaagaacaaggacgagatcctggccctgctgaaggccctgttcctgcccaagagactgagcatcatccactgccccggccaccagaagggccacagcgccgaggccagaggcaacagaatggccgaccaggccgccagaaaggccgccatcaccgagacccccgacaccagcaccctgctgatcgagaacagcagccccagcggcggcagcaagagaaccgccgacggcagcgagttcgagcccaagaagaagagaaaggtgggcagcggcaaggacaagaaatccgatggcaaggacagccagaaaaaatagtgaacatggggggtctgcggacggcttcggcccacccgcgacaagaatgccgtcatctgtcctcattacccgtattccttcccttcccccgcaaccaccacgcttactcgcgcacgtgttgagtggcacgtgcgttgtccaaacagctacacccacacccttcggggcgggtttgtcccgccctcgggttcctcgcggaacccccccctccctctctctctttctatccgccctcacttcccataactacagtgctttggtaggtgagcaccctgaccccccgcggaagctgctaacgtggcaactgtggggatccaggcaggttatcaaaggcacccggtctttccgccttcaggagtatctctgccggtgaattccggtagggctctgcttggtgccaacctcccccaaatgcgcgctgcgggagtgcacttccccaactcatcttagtaacctctcatgtgtgtgcttggtcagcatatctgaggcgacgttccgctgtcccagaccagtccagcaatggacgggccagtgtgcgtagtcgctttccggttttccggcgcatgtttggcgaaacgctgaggtaaggttggtgtgcccaacgcccgtaatttggtgatacctcaagaccacccaggaatgccagggaggtaccccacttcggtgggatctgaccctgggctaattgtctacggtggttcttcttgcttccacttctcttttttctggcatgaagagaaccgccgacggcagcgagttcgagagccccaagaagaagagaaaggtggacaagaagtacagcatcggcctggacatcggcaccaacagcgtgggctgggccgtgatcaccgacgagtacaaggtgcccagcaagaagttcaaggtgctgggcaacaccgacagacacagcatcaagaagaacctgatcggcgccctgctgttcgacagcggcgagaccgccgaggccaccagactgaagagaaccgccagaagaagatacaccagaagaaagaacagaatctgctacctgcaggagatcttcagcaacgagatggccaaggtggacgacagcttcttccacagactggaggagagcttcctggtggaggaggacaagaagcacgagagacaccccatcttcggcaacatcgtggacgaggtggcctaccacgagaagtaccccaccatctaccacctgagaaagaagctggtggacagcaccgacaaggccgacctgagactgatctacctggccctggcccacatgatcaagttcagaggccacttcctgatcgagggcgacctgaaccccgacaacagcgacgtggacaagctgttcatccagctggtgcagacctacaaccagctgttcgaggagaaccccatcaacgccagcggcgtggacgccaaggccatcctgagcgccagactgagcaagagcagaagactggagaacctgatcgcccagctgcccggcgagaagaagaacggcctgttcggcaacctgatcgccctgagcctgggcctgacccccaacttcaagagcaacttcgacctggccgaggacgccaagctgcagctgagcaaggacacctacgacgacgacctggacaacctgctggcccagatcggcgaccagtacgccgacctgttcctggccgccaagaacctgagcgacgccatcctgctgagcgacatcctgagagtgaacaccgagatcaccaaggcccccctgagcgccagcatgatcaagagatacgacgagcaccaccaggacctgaccctgctgaaggccctggtgagacagcagctgcccgagaagtacaaggagatcttcttcgaccagagcaagaacggctacgccggctacatcgacggcggcgccagccaggaggagttctacaagttcatcaagcccatcctggagaagatggacggcaccgaggagctgctggtgaagctgaacagagaggacctgctgagaaagcagagaaccttcgacaacggcagcatcccccaccagatccacctgggcgagctgcacgccatcctgagaagacaggaggacttctaccccttcctgaaggacaacagagagaagatcgagaagatcctgaccttcagaatcccctactacgtgggccccctggccagaggcaacagcagattcgcctggatgaccagaaagagcgaggagaccatcaccccctggaacttcgaggaggtggtggacaagggcgccagcgcccagagcttcatcgagagaatgaccaacttcgacaagaacctgcccaacgagaaggtgctgcccaagcacagcctgctgtacgagtacttcaccgtgtacaacgagctgaccaaggtgaagtacgtgaccgagggcatgagaaagcccgccttcctgagcggcgagcagaagaaggccatcgtggacctgctgttcaagaccaacagaaaggtgaccgtgaagcagctgaaggaggactacttcaagaagatcgagtgcttcgacagcgtggagatcagcggcgtggaggacagattcaacgccagcctgggcacctaccacgacctgctgaagatcatcaaggacaaggacttcctggacaacgaggagaacgaggacatcctggaggacatcgtgctgaccctgaccctgttcgaggacagagagatgatcgaggagagactgaagacctacgcccacctgttcgacgacaaggtgatgaagcagctgaagagaagaagatacaccggctggggcagactgagcagaaagctgatcaacggcatcagagacaagcagagcggcaagaccatcctggacttcctgaagagtgacggcttcgccaacagaaacttcatgcagctgatccacgacgacagcctgaccttcaaggaggacatccagaaggcccaggtgagcggccagggcgacagcctgcacgagcacatcgccaacctggccggcagccccgccatcaagaagggcatcctgcagaccgtgaaggtggtggacgagctggtgaaggtgatgggcagacacaagcccgagaacatcgtgatcgagatggccagagagaaccagaccacccagaagggccagaagaacagcagagagagaatgaagagaatcgaggagggcatcaaggagctgggcagccagatcctgaaggagcaccccgtggagaacacccagctgcagaacgagaagctgtacctgtactacctgcagaacggcagagacatgtacgtggaccaggagctggacatcaacagactgagcgactacgacgtggacgccatcgtgccccagagcttcctgaaggacgacagcatcgacaacaaggtgctgaccagaagcgacaagaacagaggcaagagcgacaacgtgcccagcgaggaggtggtgaagaagatgaagaactactggagacagctgctgaacgccaagctgatcacccagagaaagttcgacaacctgaccaaggccgagagaggcggcctgagcgagctggacaaggccggcttcatcaagagacagctggtggagaccagacagatcaccaagcacgtggcccagatcctggacagcagaatgaacaccaagtacgacgagaacgacaagctgatcagagaggtgaaggtgatcaccctgaagagtaagctggtgagcgacttcagaaaggacttccagttctacaaggtgagagagatcaacaactaccaccacgcccacgacgcctacctgaacgccgtggtgggcaccgccctgatcaagaagtaccccaagctggagagcgagttcgtgtacggcgactacaaggtgtacgacgtgagaaagatgatcgccaagagcgagcaggagatcggcaaggccaccgccaagtacttcttctacagcaacatcatgaacttcttcaagaccgagatcaccctggccaacggcgagatcagaaagagacccctgatcgagaccaacggcgagaccggcgagatcgtgtgggacaagggcagagacttcgccaccgtgagaaaggtgctgagcatgccccaggtgaacatcgtgaagaagaccgaggtgcagaccggcggcttcagcaaggagagcatcctgcccaagagaaacagcgacaagctgatcgccagaaagaaggactgggaccccaagaagtacggcggcttcgacagccccaccgtggcctacagcgtgctggtggtggccaaggtggagaagggcaagagcaagaagctgaagagtgtgaaggagctgctgggcatcaccatcatggagagaagcagcttcgagaagaaccccatcgacttcctggaggccaagggctacaaggaggtgaagaaggacctgatcatcaagctgcccaagtacagcctgttcgagctggagaacggcagaaagagaatgctggccagcgccggcgagctgcagaagggcaacgagctggccctgcccagcaagtacgtgaacttcctgtacctggccagccactacgagaagctgaagggcagccccgaggacaacgagcagaagcagctgttcgtggagcagcacaagcactacctggacgagatcatcgagcagatcagcgagttcagcaagagagtgatcctggccgacgccaacctggacaaggtgctgagcgcctacaacaagcacagagacaagcccatcagagagcaggccgagaacatcatccacctgttcaccctgaccaacctgggcgcccccgccgccttcaagtacttcgacaccaccatcgacagaaagagatacaccagcaccaaggaggtgctggacgccaccctgatccaccagagcatcaccggcctgtacgagaccagaatcgacctgagccagctgggcggcgacggaggaggaagcccgaagaagaagagaaaggtctagtgaaccagcctcaagaacacccgaatggagtctctaagctacataataccaacttacactttacaaaatgttgtcccccaaaatgtagccattcgtatctgctcctaataaaaagaaagtttcttcacattctaaaaaaaaaaaaaaaaaaaaaaaaaaaaaaaaaaaaaa

SEQ ID NO: 648 - DNA, 9866 bp, synthetic construct
  source 1..9866: mol_type = other DNA
aaaaaaaaaaaaaaaaaaaaaaaaaaaaaaaaaaaaaaaaaaatgaagagcaggcctgcatgcaagcttctagcataaccccttggggcctctaaacgggtcttgaggggttttttgggtgtaatcatggtcatagctgtttcctgtgtgaacagcctggggctcaccttcgggtgggcctttctgcgggtgcctaatgagtgagctaactcacattaattgcgttgcgctcactgcccgctttccagtcgggaaacctgtcgtgccagctgcattaatgaatcggccaacgcgcggggagaggcggtttgcgtattgggcgccgaagaaaggcccacccgtgaaggtgagcctcttccgcttcctcgctcactgactcgctgcgctcggtcgttcggctgcggcgagcggtatcagctcactcaaaggcggtaatacggttatccacagaatcaggggataacgcaggaaagaacatgtgagcaaaaggccagcaaaaggccaggaaccgtaaaaaggccgcgttgctggcgtttttccataggctccgcccccctgacgagcatcacaaaaatcgacgctcaagtcagaggtggcgaaacccgacaggactataaagataccaggcgtttccccctggaagctccctcgtgcgctctcctgttccgaccctgccgcttaccggatacctgtccgcctttctcccttcgggaagcgtggcgctttctcatagctcacgctgtaggtatctcagttcggtgtaggtcgttcgctccaagctgggctgtgtgcacgaaccccccgttcagcccgaccgctgcgccttatccggtaactatcgtcttgagtccaacccggtaagacacgacttatcgccactggcagcagccactggtaacaggattagcagagcgaggtatgtaggcggtgctacagagttcttgaagtggtggcctaactacggctacactagaagaacagtatttggtatctgcgctctgctgaagccagttaccttcggaaaaagagttggtagctcttgatccggcaaacaaaccaccgctggtagcggtggtttttttgtttgcaagcagcagattacgcgcagaaaaaaaggatctcaagaagatcctttgatcttttctacggggtctgacgctcagtggaacgaaaactcacgttaagggattttggtcatgagattatcaaaaaggatcttcacctagatccttttaaattaaaaatgaagttttaaatcaagcccaatctgaataatgttacaaccaattaaccaattctgattagaaaaactcatcgagcatcaaatgaaactgcaatttattcatatcaggattatcaataccatatttttgaaaaagccgtttctgtaatgaaggagaaaactcaccgaggcagttccataggatggcaagatcctggtatcggtctgcgattccgactcgtccaacatcaatacaacctattaatttcccctcgtcaaaaataaggttatcaagtgagaaatcaccatgagtgacgactgaatccggtgagaatggcaaaagtttatgcatttctttccagacttgttcaacaggccagccattacgctcgtcatcaaaatcactcgcatcaaccaaaccgttattcattcgtgattgcgcctgagcgagacgaaatacgcgatcgctgttaaaaggacaattacaaacaggaatcgaatgcaaccggcgcaggaacactgccagcgcatcaacaatattttcacctgaatcaggatattcttctaatacctggaatgctgtttttccggggatcgcagtggtgagtaaccatgcatcatcaggagtacggataaaatgcttgatggtcggaagaggcataaattccgtcagccagtttagtctgaccatctcatctgtaacatcattggcaacgctacctttgccatgtttcagaaacaactctggcgcatcgggcttcccatacaagcgatagattgtcgcacctgattgcccgacattatcgcgagcccatttatacccatataaatcagcatccatgttggaatttaatcgcggcctcgacgtttcccgttgaatatggctcataacaccccttgtattactgtttatgtaagcagacagttttattgttcatgatgatatatttttatcttgtgcaatgtaacatcagagattttgagacacgggccagagctgcatcgcgcgtttcggtgatgacggtgaaaacctctgacacatgcagctcccggagacggtcacagcttgtctgtaagcggatgccgggagcagacaagcccgtcagggcgcgtcagcgggtgttggcgggtgtcggggctggcttaactatgcggcatcagagcagattgtactgagagtgcaccatatgcggtgtgaaataccgcacagatgcgtaaggagaaaataccgcatcaggcgccattcgccattcaggctgcgcaactgttgggaagggcgatcggtgcgggcctcttcgctattacgccagctggcgaaagggggatgtgctgcaaggcgattaagttgggtaacgccagggttttcccagtcacgacgttgtaaaacgacggccagagaattcgagctcggtacctaatacgactcactataaggaagctcagaataaacgctcaactttggccggatctgccaccatgaagagaaccgccgacggcagcgagttcgagagccccaagaagaagagaaaggtgctgaacatcgaggacgagtacagactgcacgagaccagcaaggagcccgacgtgagcctgggcagcacctggctgagcgacttcccccaggcctgggccgagaccggcggcatgggcctggccgtgagacaggcccccctgatcatccccctgaaggccaccagcacccccgtgagcatcaagcagtaccccatgagccaggaggccagactgggcatcaagccccacatccagagactgctggaccagggcatcctggtgccctgccagagcccctggaacacccccctgctgcccgtgaagaagcccggcaccaacgactacagacccgtgcaggacctgagagaggtgaacaagagagtggaggacatccaccccaccgtgcccaacccctacaacctgctgagcggcctgccccccagccaccagtggtacaccgtgctggacctgaaggacgccttcttctgcctgagactgcaccccaccagccagcccctgttcgccttcgagtggagagaccccgagatgggcatcagcggccagctgacctggaccagactgccccagggcttcaagaacagccccaccctgttcaacgaggccctgcacagagacctggccgacttcagaatccagcaccccgacctgatcctgctgcagtacgtggacgacctgctgctggccgccaccagcgagctggactgccagcagggcaccagagccctgctgcagaccctgggcaacctgggctacagagccagcgccaagaaggcccagatctgccagaagcaggtgaagtacctgggctacctgctgaaggagggccagagatggctgaccgaggccagaaaggagaccgtgatgggccagcccacccccaagacccccagacagctgagagagttcctgggcaaggccggcttctgcagactgttcatccccggcttcgccgagatggccgcccccctgtaccccctgaccaagcccggcaccctgttcaactggggccccgaccagcagaaggcctaccaggagatcaagcaggccctgctgaccgcccccgccctgggcctgcccgacctgaccaagcccttcgagctgttcgtggacgagaagcagggctacgccaagggcgtgctgacccagaagctgggcccctggagaagacccgtggcctacctgagcaagaagctggaccccgtggccgccggctggcccccctgcctgagaatggtggccgccatcgccgtgctgaccaaggacgccggcaagctgaccatgggccagcccctggtgatcctggccccccacgccgtggaggccctggtgaagcagccccccgacagatggctgagcaacgccagaatgacccactaccaggccctgctgctggacaccgacagagtgcagttcggccccgtggtggccctgaaccccgccaccctgctgcccctgcccgaggagggcctgcagcacaactgcctggacatcctggccgaggcccacggcaccagacccgacctgaccgaccagcccctgcccgacgccgaccacacctggtacaccgacggcagcagcctgctgcaggagggccagagaaaggccggcgccgccgtgaccaccgagaccgaggtgatctgggccaaggccctgcccgccggcaccagcgcccagagagccgagctgatcgccctgacccaggccctgaagatggccgagggcaagaagctgaacgtgtacaccgacagcagatacgccttcgccaccgcccacatccacggcgagatctacagaagaagaggctggctgaccagcgagggcaaggagatcaagaacaaggacgagatcctggccctgctgaaggccctgttcctgcccaagagactgagcatcatccactgccccggccaccagaagggccacagcgccgaggccagaggcaacagaatggccgaccaggccgccagaaaggccgccatcaccgagacccccgacaccagcaccctgctgatcgagaacagcagccccagcggcggcagcaagagaaccgccgacggcagcgagttcgagcccaagaagaagagaaaggtgggcagcggcaaggacaagaaatccgatggcaaggacagccagaaaaaatagtgaacctaggcgtagcggccgcaaattccgcccctctccctcccccccccctaacgttactggccgaagccgcttggaataaggccggtgtgcgtttgtctatatgttattttccaccatattgccgtcttttggcaatgtgagggcccggaaacctggccctgtcttcttgacgagcattcctaggggtctttcccctctcgccaaaggaatgcaaggtctgttgaatgtcgtgaaggaagcagttcctctggaagcttcttgaagacaaacaacgtctgtagcgaccctttgcaggcagcggaaccccccacctggcgacaggtgcctctgcggccaaaagccacgtgtataagatacacctgcaaaggcggcacaaccccagtgccacgttgtgagttggatagttgtggaaagagtcaaatggctctcctcaagcgtattcaacaaggggctgaaggatgcccagaaggtaccccattgtatgggatctgatctggggcctcggtgcacatgctttacatgtgtttagtcgaggttaaaaaaacgtctaggccccccgaaccacggggacgtggttttcctttgaaaaacacgatgataatatgaagagaaccgccgacggcagcgagttcgagagccccaagaagaagagaaaggtggacaagaagtacagcatcggcctggacatcggcaccaacagcgtgggctgggccgtgatcaccgacgagtacaaggtgcccagcaagaagttcaaggtgctgggcaacaccgacagacacagcatcaagaagaacctgatcggcgccctgctgttcgacagcggcgagaccgccgaggccaccagactgaagagaaccgccagaagaagatacaccagaagaaagaacagaatctgctacctgcaggagatcttcagcaacgagatggccaaggtggacgacagcttcttccacagactggaggagagcttcctggtggaggaggacaagaagcacgagagacaccccatcttcggcaacatcgtggacgaggtggcctaccacgagaagtaccccaccatctaccacctgagaaagaagctggtggacagcaccgacaaggccgacctgagactgatctacctggccctggcccacatgatcaagttcagaggccacttcctgatcgagggcgacctgaaccccgacaacagcgacgtggacaagctgttcatccagctggtgcagacctacaaccagctgttcgaggagaaccccatcaacgccagcggcgtggacgccaaggccatcctgagcgccagactgagcaagagcagaagactggagaacctgatcgcccagctgcccggcgagaagaagaacggcctgttcggcaacctgatcgccctgagcctgggcctgacccccaacttcaagagcaacttcgacctggccgaggacgccaagctgcagctgagcaaggacacctacgacgacgacctggacaacctgctggcccagatcggcgaccagtacgccgacctgttcctggccgccaagaacctgagcgacgccatcctgctgagcgacatcctgagagtgaacaccgagatcaccaaggcccccctgagcgccagcatgatcaagagatacgacgagcaccaccaggacctgaccctgctgaaggccctggtgagacagcagctgcccgagaagtacaaggagatcttcttcgaccagagcaagaacggctacgccggctacatcgacggcggcgccagccaggaggagttctacaagttcatcaagcccatcctggagaagatggacggcaccgaggagctgctggtgaagctgaacagagaggacctgctgagaaagcagagaaccttcgacaacggcagcatcccccaccagatccacctgggcgagctgcacgccatcctgagaagacaggaggacttctaccccttcctgaaggacaacagagagaagatcgagaagatcctgaccttcagaatcccctactacgtgggccccctggccagaggcaacagcagattcgcctggatgaccagaaagagcgaggagaccatcaccccctggaacttcgaggaggtggtggacaagggcgccagcgcccagagcttcatcgagagaatgaccaacttcgacaagaacctgcccaacgagaaggtgctgcccaagcacagcctgctgtacgagtacttcaccgtgtacaacgagctgaccaaggtgaagtacgtgaccgagggcatgagaaagcccgccttcctgagcggcgagcagaagaaggccatcgtggacctgctgttcaagaccaacagaaaggtgaccgtgaagcagctgaaggaggactacttcaagaagatcgagtgcttcgacagcgtggagatcagcggcgtggaggacagattcaacgccagcctgggcacctaccacgacctgctgaagatcatcaaggacaaggacttcctggacaacgaggagaacgaggacatcctggaggacatcgtgctgaccctgaccctgttcgaggacagagagatgatcgaggagagactgaagacctacgcccacctgttcgacgacaaggtgatgaagcagctgaagagaagaagatacaccggctggggcagactgagcagaaagctgatcaacggcatcagagacaagcagagcggcaagaccatcctggacttcctgaagagtgacggcttcgccaacagaaacttcatgcagctgatccacgacgacagcctgaccttcaaggaggacatccagaaggcccaggtgagcggccagggcgacagcctgcacgagcacatcgccaacctggccggcagccccgccatcaagaagggcatcctgcagaccgtgaaggtggtggacgagctggtgaaggtgatgggcagacacaagcccgagaacatcgtgatcgagatggccagagagaaccagaccacccagaagggccagaagaacagcagagagagaatgaagagaatcgaggagggcatcaaggagctgggcagccagatcctgaaggagcaccccgtggagaacacccagctgcagaacgagaagctgtacctgtactacctgcagaacggcagagacatgtacgtggaccaggagctggacatcaacagactgagcgactacgacgtggacgccatcgtgccccagagcttcctgaaggacgacagcatcgacaacaaggtgctgaccagaagcgacaagaacagaggcaagagcgacaacgtgcccagcgaggaggtggtgaagaagatgaagaactactggagacagctgctgaacgccaagctgatcacccagagaaagttcgacaacctgaccaaggccgagagaggcggcctgagcgagctggacaaggccggcttcatcaagagacagctggtggagaccagacagatcaccaagcacgtggcccagatcctggacagcagaatgaacaccaagtacgacgagaacgacaagctgatcagagaggtgaaggtgatcaccctgaagagtaagctggtgagcgacttcagaaaggacttccagttctacaaggtgagagagatcaacaactaccaccacgcccacgacgcctacctgaacgccgtggtgggcaccgccctgatcaagaagtaccccaagctggagagcgagttcgtgtacggcgactacaaggtgtacgacgtgagaaagatgatcgccaagagcgagcaggagatcggcaaggccaccgccaagtacttcttctacagcaacatcatgaacttcttcaagaccgagatcaccctggccaacggcgagatcagaaagagacccctgatcgagaccaacggcgagaccggcgagatcgtgtgggacaagggcagagacttcgccaccgtgagaaaggtgctgagcatgccccaggtgaacatcgtgaagaagaccgaggtgcagaccggcggcttcagcaaggagagcatcctgcccaagagaaacagcgacaagctgatcgccagaaagaaggactgggaccccaagaagtacggcggcttcgacagccccaccgtggcctacagcgtgctggtggtggccaaggtggagaagggcaagagcaagaagctgaagagtgtgaaggagctgctgggcatcaccatcatggagagaagcagcttcgagaagaaccccatcgacttcctggaggccaagggctacaaggaggtgaagaaggacctgatcatcaagctgcccaagtacagcctgttcgagctggagaacggcagaaagagaatgctggccagcgccggcgagctgcagaagggcaacgagctggccctgcccagcaagtacgtgaacttcctgtacctggccagccactacgagaagctgaagggcagccccgaggacaacgagcagaagcagctgttcgtggagcagcacaagcactacctggacgagatcatcgagcagatcagcgagttcagcaagagagtgatcctggccgacgccaacctggacaaggtgctgagcgcctacaacaagcacagagacaagcccatcagagagcaggccgagaacatcatccacctgttcaccctgaccaacctgggcgcccccgccgccttcaagtacttcgacaccaccatcgacagaaagagatacaccagcaccaaggaggtgctggacgccaccctgatccaccagagcatcaccggcctgtacgagaccagaatcgacctgagccagctgggcggcgacggaggaggaagcccgaagaagaagagaaaggtctagtgaaccagcctcaagaacacccgaatggagtctctaagctacataataccaacttacactttacaaaatgttgtcccccaaaatgtagccattcgtatctgctcctaataaaaagaaagtttcttcacattctaaaaaaaaaaaaaaaaaaaaaaaaaaaaaaaaaaaaa

SEQ ID NO: 649 - protein, 543 aa, synthetic construct
MPAAKRVKLDYPYDVPDYAKDKKSDGKDSQKKGSRALVVIRLSRVTDATTSPERQLESCQQLCAQRGWDVVGVAEDLDVSGAVDPFDRKRRPNLARWLAFEEQPFDVIVAYRVDRLTRSIRHLQQLVHWAEDHKKLVVSATEAHFDTTTPFAAVVIALMGTVAQMELEAIKERNRSAAHFNIRAGKYRGSLPPWGYLPTRVDGEWRLVPDPVQRERILEVYHRVVDNHEPLHLVAHDLNRRGVLSPKDYFAQLQGREPQGREWSATALKRSMISEAMLGYATLNGKTVRDDDGAPLVRAEPILTREQLEALRAELVKTSRAKPAVSTPSLLLRVLFCAVCGEPAYKFAGGGRKHPRYRCRSMGFPKHCGNGTVAMAEWDAFCEEQVLDLLGDAERLEKVWVAGSDSAVELAEVNAELVDLTSLIGSPAYRAGSPQREALDARIAALAARQEELEGLEARPSGWEWRETGQRFGDWWREQDTAAKNTWLRSMNVRLTFDVRGGLTRTIDFGDLQEYEQHLRLGSVVERLHTGMSGSGPKKKRKV

SEQ ID NO: 650 - DNA, 1632 bp, synthetic construct
  source 1..1632: mol_type = other DNA
atgcctgctgctaagagagtgaaactggattacccctacgacgtgcccgactacgccaaggacaagaaatccgatggcaaggacagccagaaaaaaggcagcagagccctggtggtgatcagactgagcagagtgaccgacgccaccaccagccccgagagacagctggagagctgccagcagctgtgcgcccagagaggctgggacgtggtgggcgtggccgaggacctggacgtgagcggcgccgtggaccccttcgacagaaagagaagacccaacctggccagatggctggccttcgaggagcagcccttcgacgtgatcgtggcctacagagtggacagactgaccagaagcatcagacacctgcagcagctggtgcactgggccgaggaccacaagaagctggtggtgagcgccaccgaggcccacttcgacaccaccacccccttcgccgccgtggtgatcgccctgatgggcaccgtggcccagatggagctggaggccatcaaggagagaaacagaagcgccgcccacttcaacatcagagccggcaagtacagaggcagcctgcccccctggggctacctgcccaccagagtggacggcgagtggagactggtgcccgaccccgtgcagagagagagaatcctggaggtgtaccacagagtggtggacaaccacgagcccctgcacctggtggcccacgacctgaacagaagaggcgtgctgagccccaaggactacttcgcccagctgcagggcagagagccccagggcagagagtggagcgccaccgccctgaagagaagcatgatcagcgaggccatgctgggctacgccaccctgaacggcaagaccgtgagagacgacgacggcgcccccctggtgagagccgagcccatcctgaccagagagcagctggaggccctgagagccgagctggtgaagaccagcagagccaagcccgccgtgagcacccccagcctgctgctgagagtgctgttctgcgccgtgtgcggcgagcccgcctacaagttcgccggcggcggcagaaagcaccccagatacagatgcagaagcatgggcttccccaagcactgcggcaacggcaccgtggccatggccgagtgggacgccttctgcgaggagcaggtgctggacctgctgggcgacgccgagagactggagaaggtgtgggtggccggcagcgacagcgccgtggagctggccgaggtgaacgccgagctggtggacctgaccagcctgatcggcagccccgcctacagagccggcagcccccagagagaggccctggacgccagaatcgccgccctggccgccagacaggaggagctggagggcctggaggccagacccagcggctgggagtggagagagaccggccagagattcggcgactggtggagagagcaggacaccgccgccaagaacacctggctgagaagcatgaacgtgagactgaccttcgacgtgagaggcggcctgaccagaaccatcgacttcggcgacctgcaggagtacgagcagcacctgagactgggcagcgtggtggagagactgcacaccggcatgagcggcagcggccccaagaagaagagaaaggtgtga

SEQ ID NO: 651 - protein, 534 aa, synthetic construct
MPAAKRVKLDKDKKSDGKDSQKKGSRALVVIRLSRVTDATTSPERQLESCQQLCAQRGWDVVGVAEDLDVSGAVDPFDRKRRPNLARWLAFEEQPFDVIVAYRVDRLTRSIRHLQQLVHWAEDHKKLVVSATEAHFDTTTPFAAVVIALMGTVAQMELEAIKERNRSAAHFNIRAGKYRGSLPPWGYLPTRVDGEWRLVPDPVQRERILEVYHRVVDNHEPLHLVAHDLNRRGVLSPKDYFAQLQGREPQGREWSATALKRSMISEAMLGYATLNGKTVRDDDGAPLVRAEPILTREQLEALRAELVKTSRAKPAVSTPSLLLRVLFCAVCGEPAYKFAGGGRKHPRYRCRSMGFPKHCGNGTVAMAEWDAFCEEQVLDLLGDAERLEKVWVAGSDSAVELAEVNAELVDLTSLIGSPAYRAGSPQREALDARIAALAARQEELEGLEARPSGWEWRETGQRFGDWWREQDTAAKNTWLRSMNVRLTFDVRGGLTRTIDFGDLQEYEQHLRLGSVVERLHTGMSGSGPKKKRKV

SEQ ID NO: 652 - DNA, 1605 bp, synthetic construct
  source 1..1605: mol_type = other DNA
atgcctgctgctaagagagtgaaactggataaggacaagaaatccgatggcaaggacagccagaaaaaaggcagcagagccctggtggtgatcagactgagcagagtgaccgacgccaccaccagccccgagagacagctggagagctgccagcagctgtgcgcccagagaggctgggacgtggtgggcgtggccgaggacctggacgtgagcggcgccgtggaccccttcgacagaaagagaagacccaacctggccagatggctggccttcgaggagcagcccttcgacgtgatcgtggcctacagagtggacagactgaccagaagcatcagacacctgcagcagctggtgcactgggccgaggaccacaagaagctggtggtgagcgccaccgaggcccacttcgacaccaccacccccttcgccgccgtggtgatcgccctgatgggcaccgtggcccagatggagctggaggccatcaaggagagaaacagaagcgccgcccacttcaacatcagagccggcaagtacagaggcagcctgcccccctggggctacctgcccaccagagtggacggcgagtggagactggtgcccgaccccgtgcagagagagagaatcctggaggtgtaccacagagtggtggacaaccacgagcccctgcacctggtggcccacgacctgaacagaagaggcgtgctgagccccaaggactacttcgcccagctgcagggcagagagccccagggcagagagtggagcgccaccgccctgaagagaagcatgatcagcgaggccatgctgggctacgccaccctgaacggcaagaccgtgagagacgacgacggcgcccccctggtgagagccgagcccatcctgaccagagagcagctggaggccctgagagccgagctggtgaagaccagcagagccaagcccgccgtgagcacccccagcctgctgctgagagtgctgttctgcgccgtgtgcggcgagcccgcctacaagttcgccggcggcggcagaaagcaccccagatacagatgcagaagcatgggcttccccaagcactgcggcaacggcaccgtggccatggccgagtgggacgccttctgcgaggagcaggtgctggacctgctgggcgacgccgagagactggagaaggtgtgggtggccggcagcgacagcgccgtggagctggccgaggtgaacgccgagctggtggacctgaccagcctgatcggcagccccgcctacagagccggcagcccccagagagaggccctggacgccagaatcgccgccctggccgccagacaggaggagctggagggcctggaggccagacccagcggctgggagtggagagagaccggccagagattcggcgactggtggagagagcaggacaccgccgccaagaacacctggctgagaagcatgaacgtgagactgaccttcgacgtgagaggcggcctgaccagaaccatcgacttcggcgacctgcaggagtacgagcagcacctgagactgggcagcgtggtggagagactgcacaccggcatgagcggcagcggccccaagaagaagagaaaggtgtga

SEQ ID NO: 653 - protein, 524 aa, synthetic construct
MPAAKRVKLDKDKKSDGKDSQKKGSRALVVIRLSRVTDATTSPERQLESCQQLCAQRGWDVVGVAEDLDVSGAVDPFDRKRRPNLARWLAFEEQPFDVIVAYRVDRLTRSIRHLQQLVHWAEDHKKLVVSATEAHFDTTTPFAAVVIALMGTVAQMELEAIKERNRSAAHFNIRAGKYRGSLPPWGYLPTRVDGEWRLVPDPVQRERILEVYHRVVDNHEPLHLVAHDLNRRGVLSPKDYFAQLQGREPQGREWSATALKRSMISEAMLGYATLNGKTVRDDDGAPLVRAEPILTREQLEALRAELVKTSRAKPAVSTPSLLLRVLFCAVCGEPAYKFAGGGRKHPRYRCRSMGFPKHCGNGTVAMAEWDAFCEEQVLDLLGDAERLEKVWVAGSDSAVELAEVNAELVDLTSLIGSPAYRAGSPQREALDARIAALAARQEELEGLEARPSGWEWRETGQRFGDWWREQDTAAKNTWLRSMNVRLTFDVRGGLTRTIDFGDLQEYEQHLRLGSVVERLHTGMS

SEQ ID NO: 654 - DNA, 1575 bp, synthetic construct
  source 1..1575: mol_type = other DNA
atgcctgctgctaagagagtgaaactggataaggacaagaaatccgatggcaaggacagccagaaaaaaggcagcagagccctggtggtgatcagactgagcagagtgaccgacgccaccaccagccccgagagacagctggagagctgccagcagctgtgcgcccagagaggctgggacgtggtgggcgtggccgaggacctggacgtgagcggcgccgtggaccccttcgacagaaagagaagacccaacctggccagatggctggccttcgaggagcagcccttcgacgtgatcgtggcctacagagtggacagactgaccagaagcatcagacacctgcagcagctggtgcactgggccgaggaccacaagaagctggtggtgagcgccaccgaggcccacttcgacaccaccacccccttcgccgccgtggtgatcgccctgatgggcaccgtggcccagatggagctggaggccatcaaggagagaaacagaagcgccgcccacttcaacatcagagccggcaagtacagaggcagcctgcccccctggggctacctgcccaccagagtggacggcgagtggagactggtgcccgaccccgtgcagagagagagaatcctggaggtgtaccacagagtggtggacaaccacgagcccctgcacctggtggcccacgacctgaacagaagaggcgtgctgagccccaaggactacttcgcccagctgcagggcagagagccccagggcagagagtggagcgccaccgccctgaagagaagcatgatcagcgaggccatgctgggctacgccaccctgaacggcaagaccgtgagagacgacgacggcgcccccctggtgagagccgagcccatcctgaccagagagcagctggaggccctgagagccgagctggtgaagaccagcagagccaagcccgccgtgagcacccccagcctgctgctgagagtgctgttctgcgccgtgtgcggcgagcccgcctacaagttcgccggcggcggcagaaagcaccccagatacagatgcagaagcatgggcttccccaagcactgcggcaacggcaccgtggccatggccgagtgggacgccttctgcgaggagcaggtgctggacctgctgggcgacgccgagagactggagaaggtgtgggtggccggcagcgacagcgccgtggagctggccgaggtgaacgccgagctggtggacctgaccagcctgatcggcagccccgcctacagagccggcagcccccagagagaggccctggacgccagaatcgccgccctggccgccagacaggaggagctggagggcctggaggccagacccagcggctgggagtggagagagaccggccagagattcggcgactggtggagagagcaggacaccgccgccaagaacacctggctgagaagcatgaacgtgagactgaccttcgacgtgagaggcggcctgaccagaaccatcgacttcggcgacctgcaggagtacgagcagcacctgagactgggcagcgtggtggagagactgcacaccggcatgagctga

SEQ ID NO: 655 - protein, 511 aa, synthetic construct
MPAAKRVKLDGSRALVVIRLSRVTDATTSPERQLESCQQLCAQRGWDVVGVAEDLDVSGAVDPFDRKRRPNLARWLAFEEQPFDVIVAYRVDRLTRSIRHLQQLVHWAEDHKKLVVSATEAHFDTTTPFAAVVIALMGTVAQMELEAIKERNRSAAHFNIRAGKYRGSLPPWGYLPTRVDGEWRLVPDPVQRERILEVYHRVVDNHEPLHLVAHDLNRRGVLSPKDYFAQLQGREPQGREWSATALKRSMISEAMLGYATLNGKTVRDDDGAPLVRAEPILTREQLEALRAELVKTSRAKPAVSTPSLLLRVLFCAVCGEPAYKFAGGGRKHPRYRCRSMGFPKHCGNGTVAMAEWDAFCEEQVLDLLGDAERLEKVWVAGSDSAVELAEVNAELVDLTSLIGSPAYRAGSPQREALDARIAALAARQEELEGLEARPSGWEWRETGQRFGDWWREQDTAAKNTWLRSMNVRLTFDVRGGLTRTIDFGDLQEYEQHLRLGSVVERLHTGMS

SEQ ID NO: 656 - DNA, 1536 bp, synthetic construct
  source 1..1536: mol_type = other DNA
atgcctgctgctaagagagtgaaactggatggcagcagagccctggtggtgatcagactgagcagagtgaccgacgccaccaccagccccgagagacagctggagagctgccagcagctgtgcgcccagagaggctgggacgtggtgggcgtggccgaggacctggacgtgagcggcgccgtggaccccttcgacagaaagagaagacccaacctggccagatggctggccttcgaggagcagcccttcgacgtgatcgtggcctacagagtggacagactgaccagaagcatcagacacctgcagcagctggtgcactgggccgaggaccacaagaagctggtggtgagcgccaccgaggcccacttcgacaccaccacccccttcgccgccgtggtgatcgccctgatgggcaccgtggcccagatggagctggaggccatcaaggagagaaacagaagcgccgcccacttcaacatcagagccggcaagtacagaggcagcctgcccccctggggctacctgcccaccagagtggacggcgagtggagactggtgcccgaccccgtgcagagagagagaatcctggaggtgtaccacagagtggtggacaaccacgagcccctgcacctggtggcccacgacctgaacagaagaggcgtgctgagccccaaggactacttcgcccagctgcagggcagagagccccagggcagagagtggagcgccaccgccctgaagagaagcatgatcagcgaggccatgctgggctacgccaccctgaacggcaagaccgtgagagacgacgacggcgcccccctggtgagagccgagcccatcctgaccagagagcagctggaggccctgagagccgagctggtgaagaccagcagagccaagcccgccgtgagcacccccagcctgctgctgagagtgctgttctgcgccgtgtgcggcgagcccgcctacaagttcgccggcggcggcagaaagcaccccagatacagatgcagaagcatgggcttccccaagcactgcggcaacggcaccgtggccatggccgagtgggacgccttctgcgaggagcaggtgctggacctgctgggcgacgccgagagactggagaaggtgtgggtggccggcagcgacagcgccgtggagctggccgaggtgaacgccgagctggtggacctgaccagcctgatcggcagccccgcctacagagccggcagcccccagagagaggccctggacgccagaatcgccgccctggccgccagacaggaggagctggagggcctggaggccagacccagcggctgggagtggagagagaccggccagagattcggcgactggtggagagagcaggacaccgccgccaagaacacctggctgagaagcatgaacgtgagactgaccttcgacgtgagaggcggcctgaccagaaccatcgacttcggcgacctgcaggagtacgagcagcacctgagactgggcagcgtggtggagagactgcacaccggcatgagctga

SEQ ID NO: 657 - protein, 531 aa, synthetic construct
MPKKKRKVYPYDVPDYAKDGKKDKKEEDKKGSRALVVIRLSRVTDATTSPERQLESCQQLCAQRGWDVVGVAEDLDVSGAVDPFDRKRRPNLARWLAFEEQPFDVIVAYRVDRLTRSIRHLQQLVHWAEDHKKLVVSATEAHFDTTTPFAAVVIALMGTVAQMELEAIKERNRSAAHFNIRAGKYRGSLPPWGYLPTRVDGEWRLVPDPVQRERILEVYHRVVDNHEPLHLVAHDLNRRGVLSPKDYFAQLQGREPQGREWSATALKRSMISEAMLGYATLNGKTVRDDDGAPLVRAEPILTREQLEALRAELVKTSRAKPAVSTPSLLLRVLFCAVCGEPAYKFAGGGRKHPRYRCRSMGFPKHCGNGTVAMAEWDAFCEEQVLDLLGDAERLEKVWVAGSDSAVELAEVNAELVDLTSLIGSPAYRAGSPQREALDARIAALAARQEELEGLEARPSGWEWRETGQRFGDWWREQDTAAKNTWLRSMNVRLTFDVRGGLTRTIDFGDLQEYEQHLRLGSVVERLHTGMS

SEQ ID NO: 658 - DNA, 1596 bp, synthetic construct
  source 1..1596: mol_type = other DNA
atgcccaagaagaagagaaaggtgtacccctacgacgtgcccgactacgccaaggacggcaagaaggacaagaaggaggaggacaagaagggcagcagagccctggtggtgatcagactgagcagagtgaccgacgccaccaccagccccgagagacagctggagagctgccagcagctgtgcgcccagagaggctgggacgtggtgggcgtggccgaggacctggacgtgagcggcgccgtggaccccttcgacagaaagagaagacccaacctggccagatggctggccttcgaggagcagcccttcgacgtgatcgtggcctacagagtggacagactgaccagaagcatcagacacctgcagcagctggtgcactgggccgaggaccacaagaagctggtggtgagcgccaccgaggcccacttcgacaccaccacccccttcgccgccgtggtgatcgccctgatgggcaccgtggcccagatggagctggaggccatcaaggagagaaacagaagcgccgcccacttcaacatcagagccggcaagtacagaggcagcctgcccccctggggctacctgcccaccagagtggacggcgagtggagactggtgcccgaccccgtgcagagagagagaatcctggaggtgtaccacagagtggtggacaaccacgagcccctgcacctggtggcccacgacctgaacagaagaggcgtgctgagccccaaggactacttcgcccagctgcagggcagagagccccagggcagagagtggagcgccaccgccctgaagagaagcatgatcagcgaggccatgctgggctacgccaccctgaacggcaagaccgtgagagacgacgacggcgcccccctggtgagagccgagcccatcctgaccagagagcagctggaggccctgagagccgagctggtgaagaccagcagagccaagcccgccgtgagcacccccagcctgctgctgagagtgctgttctgcgccgtgtgcggcgagcccgcctacaagttcgccggcggcggcagaaagcaccccagatacagatgcagaagcatgggcttccccaagcactgcggcaacggcaccgtggccatggccgagtgggacgccttctgcgaggagcaggtgctggacctgctgggcgacgccgagagactggagaaggtgtgggtggccggcagcgacagcgccgtggagctggccgaggtgaacgccgagctggtggacctgaccagcctgatcggcagccccgcctacagagccggcagcccccagagagaggccctggacgccagaatcgccgccctggccgccagacaggaggagctggagggcctggaggccagacccagcggctgggagtggagagagaccggccagagattcggcgactggtggagagagcaggacaccgccgccaagaacacctggctgagaagcatgaacgtgagactgaccttcgacgtgagaggcggcctgaccagaaccatcgacttcggcgacctgcaggagtacgagcagcacctgagactgggcagcgtggtggagagactgcacaccggcatgagctga

SEQ ID NO: 659 - protein, 547 aa, synthetic construct
MPKKKRKVYPYDVPDYAKDGKKDKKEEDKKGSRALVVIRLSRVTDATTSPERQLESCQQLCAQRGWDVVGVAEDLDVSGAVDPFDRKRRPNLARWLAFEEQPFDVIVAYRVDRLTRSIRHLQQLVHWAEDHKKLVVSATEAHFDTTTPFAAVVIALMGTVAQMELEAIKERNRSAAHFNIRAGKYRGSLPPWGYLPTRVDGEWRLVPDPVQRERILEVYHRVVDNHEPLHLVAHDLNRRGVLSPKDYFAQLQGREPQGREWSATALKRSMISEAMLGYATLNGKTVRDDDGAPLVRAEPILTREQLEALRAELVKTSRAKPAVSTPSLLLRVLFCAVCGEPAYKFAGGGRKHPRYRCRSMGFPKHCGNGTVAMAEWDAFCEEQVLDLLGDAERLEKVWVAGSDSAVELAEVNAELVDLTSLIGSPAYRAGSPQREALDARIAALAARQEELEGLEARPSGWEWRETGQRFGDWWREQDTAAKNTWLRSMNVRLTFDVRGGLTRTIDFGDLQEYEQHLRLGSVVERLHTGMSGSGKDGKKDKKEEDKK

SEQ ID NO: 660 - DNA, 1644 bp, synthetic construct
  source 1..1644: mol_type = other DNA
atgcccaagaagaagagaaaggtgtacccctacgacgtgcccgactacgccaaggacggcaagaaggacaagaaggaggaggacaagaagggcagcagagccctggtggtgatcagactgagcagagtgaccgacgccaccaccagccccgagagacagctggagagctgccagcagctgtgcgcccagagaggctgggacgtggtgggcgtggccgaggacctggacgtgagcggcgccgtggaccccttcgacagaaagagaagacccaacctggccagatggctggccttcgaggagcagcccttcgacgtgatcgtggcctacagagtggacagactgaccagaagcatcagacacctgcagcagctggtgcactgggccgaggaccacaagaagctggtggtgagcgccaccgaggcccacttcgacaccaccacccccttcgccgccgtggtgatcgccctgatgggcaccgtggcccagatggagctggaggccatcaaggagagaaacagaagcgccgcccacttcaacatcagagccggcaagtacagaggcagcctgcccccctggggctacctgcccaccagagtggacggcgagtggagactggtgcccgaccccgtgcagagagagagaatcctggaggtgtaccacagagtggtggacaaccacgagcccctgcacctggtggcccacgacctgaacagaagaggcgtgctgagccccaaggactacttcgcccagctgcagggcagagagccccagggcagagagtggagcgccaccgccctgaagagaagcatgatcagcgaggccatgctgggctacgccaccctgaacggcaagaccgtgagagacgacgacggcgcccccctggtgagagccgagcccatcctgaccagagagcagctggaggccctgagagccgagctggtgaagaccagcagagccaagcccgccgtgagcacccccagcctgctgctgagagtgctgttctgcgccgtgtgcggcgagcccgcctacaagttcgccggcggcggcagaaagcaccccagatacagatgcagaagcatgggcttccccaagcactgcggcaacggcaccgtggccatggccgagtgggacgccttctgcgaggagcaggtgctggacctgctgggcgacgccgagagactggagaaggtgtgggtggccggcagcgacagcgccgtggagctggccgaggtgaacgccgagctggtggacctgaccagcctgatcggcagccccgcctacagagccggcagcccccagagagaggccctggacgccagaatcgccgccctggccgccagacaggaggagctggagggcctggaggccagacccagcggctgggagtggagagagaccggccagagattcggcgactggtggagagagcaggacaccgccgccaagaacacctggctgagaagcatgaacgtgagactgaccttcgacgtgagaggcggcctgaccagaaccatcgacttcggcgacctgcaggagtacgagcagcacctgagactgggcagcgtggtggagagactgcacaccggcatgagcggcagcggcaaggacggcaagaaggacaagaaggaggaggacaagaagtga

SEQ ID NO: 661 - protein, 541 aa, synthetic construct
MPKKKRKVYPYDVPDYAQPRFAAAGSGKDGKKDKKEEDKKGSRALVVIRLSRVTDATTSPERQLESCQQLCAQRGWDVVGVAEDLDVSGAVDPFDRKRRPNLARWLAFEEQPFDVIVAYRVDRLTRSIRHLQQLVHWAEDHKKLVVSATEAHFDTTTPFAAVVIALMGTVAQMELEAIKERNRSAAHFNIRAGKYRGSLPPWGYLPTRVDGEWRLVPDPVQRERILEVYHRVVDNHEPLHLVAHDLNRRGVLSPKDYFAQLQGREPQGREWSATALKRSMISEAMLGYATLNGKTVRDDDGAPLVRAEPILTREQLEALRAELVKTSRAKPAVSTPSLLLRVLFCAVCGEPAYKFAGGGRKHPRYRCRSMGFPKHCGNGTVAMAEWDAFCEEQVLDLLGDAERLEKVWVAGSDSAVELAEVNAELVDLTSLIGSPAYRAGSPQREALDARIAALAARQEELEGLEARPSGWEWRETGQRFGDWWREQDTAAKNTWLRSMNVRLTFDVRGGLTRTIDFGDLQEYEQHLRLGSVVERLHTGMS

SEQ ID NO: 662 - DNA, 1626 bp, synthetic construct
  source 1..1626: mol_type = other DNA
atgcccaagaagaagagaaaggtgtacccctacgacgtgcccgactacgcccaaccgcggttcgcggccgctggcagcggcaaggacggcaagaaggacaagaaggaggaggacaagaagggcagcagagccctggtggtgatcagactgagcagagtgaccgacgccaccaccagccccgagagacagctggagagctgccagcagctgtgcgcccagagaggctgggacgtggtgggcgtggccgaggacctggacgtgagcggcgccgtggaccccttcgacagaaagagaagacccaacctggccagatggctggccttcgaggagcagcccttcgacgtgatcgtggcctacagagtggacagactgaccagaagcatcagacacctgcagcagctggtgcactgggccgaggaccacaagaagctggtggtgagcgccaccgaggcccacttcgacaccaccacccccttcgccgccgtggtgatcgccctgatgggcaccgtggcccagatggagctggaggccatcaaggagagaaacagaagcgccgcccacttcaacatcagagccggcaagtacagaggcagcctgcccccctggggctacctgcccaccagagtggacggcgagtggagactggtgcccgaccccgtgcagagagagagaatcctggaggtgtaccacagagtggtggacaaccacgagcccctgcacctggtggcccacgacctgaacagaagaggcgtgctgagccccaaggactacttcgcccagctgcagggcagagagccccagggcagagagtggagcgccaccgccctgaagagaagcatgatcagcgaggccatgctgggctacgccaccctgaacggcaagaccgtgagagacgacgacggcgcccccctggtgagagccgagcccatcctgaccagagagcagctggaggccctgagagccgagctggtgaagaccagcagagccaagcccgccgtgagcacccccagcctgctgctgagagtgctgttctgcgccgtgtgcggcgagcccgcctacaagttcgccggcggcggcagaaagcaccccagatacagatgcagaagcatgggcttccccaagcactgcggcaacggcaccgtggccatggccgagtgggacgccttctgcgaggagcaggtgctggacctgctgggcgacgccgagagactggagaaggtgtgggtggccggcagcgacagcgccgtggagctggccgaggtgaacgccgagctggtggacctgaccagcctgatcggcagccccgcctacagagccggcagcccccagagagaggccctggacgccagaatcgccgccctggccgccagacaggaggagctggagggcctggaggccagacccagcggctgggagtggagagagaccggccagagattcggcgactggtggagagagcaggacaccgccgccaagaacacctggctgagaagcatgaacgtgagactgaccttcgacgtgagaggcggcctgaccagaaccatcgacttcggcgacctgcaggagtacgagcagcacctgagactgggcagcgtggtggagagactgcacaccggcatgagctga

SEQ ID NO: 663 - protein, 557 aa, synthetic construct
MPKKKRKVYPYDVPDYAQPRFAAAGSGKDGKKDKKEEDKKGSRALVVIRLSRVTDATTSPERQLESCQQLCAQRGWDVVGVAEDLDVSGAVDPFDRKRRPNLARWLAFEEQPFDVIVAYRVDRLTRSIRHLQQLVHWAEDHKKLVVSATEAHFDTTTPFAAVVIALMGTVAQMELEAIKERNRSAAHFNIRAGKYRGSLPPWGYLPTRVDGEWRLVPDPVQRERILEVYHRVVDNHEPLHLVAHDLNRRGVLSPKDYFAQLQGREPQGREWSATALKRSMISEAMLGYATLNGKTVRDDDGAPLVRAEPILTREQLEALRAELVKTSRAKPAVSTPSLLLRVLFCAVCGEPAYKFAGGGRKHPRYRCRSMGFPKHCGNGTVAMAEWDAFCEEQVLDLLGDAERLEKVWVAGSDSAVELAEVNAELVDLTSLIGSPAYRAGSPQREALDARIAALAARQEELEGLEARPSGWEWRETGQRFGDWWREQDTAAKNTWLRSMNVRLTFDVRGGLTRTIDFGDLQEYEQHLRLGSVVERLHTGMSGSGKDGKKDKKEEDKK

SEQ ID NO: 664 - DNA, 1674 bp, synthetic construct
  source 1..1674: mol_type = other DNA
atgcccaagaagaagagaaaggtgtacccctacgacgtgcccgactacgcccaaccgcggttcgcggccgctggcagcggcaaggacggcaagaaggacaagaaggaggaggacaagaagggcagcagagccctggtggtgatcagactgagcagagtgaccgacgccaccaccagccccgagagacagctggagagctgccagcagctgtgcgcccagagaggctgggacgtggtgggcgtggccgaggacctggacgtgagcggcgccgtggaccccttcgacagaaagagaagacccaacctggccagatggctggccttcgaggagcagcccttcgacgtgatcgtggcctacagagtggacagactgaccagaagcatcagacacctgcagcagctggtgcactgggccgaggaccacaagaagctggtggtgagcgccaccgaggcccacttcgacaccaccacccccttcgccgccgtggtgatcgccctgatgggcaccgtggcccagatggagctggaggccatcaaggagagaaacagaagcgccgcccacttcaacatcagagccggcaagtacagaggcagcctgcccccctggggctacctgcccaccagagtggacggcgagtggagactggtgcccgaccccgtgcagagagagagaatcctggaggtgtaccacagagtggtggacaaccacgagcccctgcacctggtggcccacgacctgaacagaagaggcgtgctgagccccaaggactacttcgcccagctgcagggcagagagccccagggcagagagtggagcgccaccgccctgaagagaagcatgatcagcgaggccatgctgggctacgccaccctgaacggcaagaccgtgagagacgacgacggcgcccccctggtgagagccgagcccatcctgaccagagagcagctggaggccctgagagccgagctggtgaagaccagcagagccaagcccgccgtgagcacccccagcctgctgctgagagtgctgttctgcgccgtgtgcggcgagcccgcctacaagttcgccggcggcggcagaaagcaccccagatacagatgcagaagcatgggcttccccaagcactgcggcaacggcaccgtggccatggccgagtgggacgccttctgcgaggagcaggtgctggacctgctgggcgacgccgagagactggagaaggtgtgggtggccggcagcgacagcgccgtggagctggccgaggtgaacgccgagctggtggacctgaccagcctgatcggcagccccgcctacagagccggcagcccccagagagaggccctggacgccagaatcgccgccctggccgccagacaggaggagctggagggcctggaggccagacccagcggctgggagtggagagagaccggccagagattcggcgactggtggagagagcaggacaccgccgccaagaacacctggctgagaagcatgaacgtgagactgaccttcgacgtgagaggcggcctgaccagaaccatcgacttcggcgacctgcaggagtacgagcagcacctgagactgggcagcgtggtggagagactgcacaccggcatgagcggcagcggcaaggacggcaagaaggacaagaaggaggaggacaagaagtga

SEQ ID NO: 665 - protein, 541 aa, synthetic construct
MPKKKRKVYPYDVPDYAKDGKKDKKEEDKKGSGQPRFAAAGSRALVVIRLSRVTDATTSPERQLESCQQLCAQRGWDVVGVAEDLDVSGAVDPFDRKRRPNLARWLAFEEQPFDVIVAYRVDRLTRSIRHLQQLVHWAEDHKKLVVSATEAHFDTTTPFAAVVIALMGTVAQMELEAIKERNRSAAHFNIRAGKYRGSLPPWGYLPTRVDGEWRLVPDPVQRERILEVYHRVVDNHEPLHLVAHDLNRRGVLSPKDYFAQLQGREPQGREWSATALKRSMISEAMLGYATLNGKTVRDDDGAPLVRAEPILTREQLEALRAELVKTSRAKPAVSTPSLLLRVLFCAVCGEPAYKFAGGGRKHPRYRCRSMGFPKHCGNGTVAMAEWDAFCEEQVLDLLGDAERLEKVWVAGSDSAVELAEVNAELVDLTSLIGSPAYRAGSPQREALDARIAALAARQEELEGLEARPSGWEWRETGQRFGDWWREQDTAAKNTWLRSMNVRLTFDVRGGLTRTIDFGDLQEYEQHLRLGSVVERLHTGMS

SEQ ID NO: 666 - DNA, 1626 bp, synthetic construct
  source 1..1626: mol_type = other DNA
atgcccaagaagaagagaaaggtgtacccctacgacgtgcccgactacgccaaggacggcaagaaggacaagaaggaggaggacaagaagggcagcggccaaccgcggttcgcggccgctggcagcagagccctggtggtgatcagactgagcagagtgaccgacgccaccaccagccccgagagacagctggagagctgccagcagctgtgcgcccagagaggctgggacgtggtgggcgtggccgaggacctggacgtgagcggcgccgtggaccccttcgacagaaagagaagacccaacctggccagatggctggccttcgaggagcagcccttcgacgtgatcgtggcctacagagtggacagactgaccagaagcatcagacacctgcagcagctggtgcactgggccgaggaccacaagaagctggtggtgagcgccaccgaggcccacttcgacaccaccacccccttcgccgccgtggtgatcgccctgatgggcaccgtggcccagatggagctggaggccatcaaggagagaaacagaagcgccgcccacttcaacatcagagccggcaagtacagaggcagcctgcccccctggggctacctgcccaccagagtggacggcgagtggagactggtgcccgaccccgtgcagagagagagaatcctggaggtgtaccacagagtggtggacaaccacgagcccctgcacctggtggcccacgacctgaacagaagaggcgtgctgagccccaaggactacttcgcccagctgcagggcagagagccccagggcagagagtggagcgccaccgccctgaagagaagcatgatcagcgaggccatgctgggctacgccaccctgaacggcaagaccgtgagagacgacgacggcgcccccctggtgagagccgagcccatcctgaccagagagcagctggaggccctgagagccgagctggtgaagaccagcagagccaagcccgccgtgagcacccccagcctgctgctgagagtgctgttctgcgccgtgtgcggcgagcccgcctacaagttcgccggcggcggcagaaagcaccccagatacagatgcagaagcatgggcttccccaagcactgcggcaacggcaccgtggccatggccgagtgggacgccttctgcgaggagcaggtgctggacctgctgggcgacgccgagagactggagaaggtgtgggtggccggcagcgacagcgccgtggagctggccgaggtgaacgccgagctggtggacctgaccagcctgatcggcagccccgcctacagagccggcagcccccagagagaggccctggacgccagaatcgccgccctggccgccagacaggaggagctggagggcctggaggccagacccagcggctgggagtggagagagaccggccagagattcggcgactggtggagagagcaggacaccgccgccaagaacacctggctgagaagcatgaacgtgagactgaccttcgacgtgagaggcggcctgaccagaaccatcgacttcggcgacctgcaggagtacgagcagcacctgagactgggcagcgtggtggagagactgcacaccggcatgagctga

SEQ ID NO: 667 - protein, 557 aa, synthetic construct
MPKKKRKVYPYDVPDYAKDGKKDKKEEDKKGSGQPRFAAAGSRALVVIRLSRVTDATTSPERQLESCQQLCAQRGWDVVGVAEDLDVSGAVDPFDRKRRPNLARWLAFEEQPFDVIVAYRVDRLTRSIRHLQQLVHWAEDHKKLVVSATEAHFDTTTPFAAVVIALMGTVAQMELEAIKERNRSAAHFNIRAGKYRGSLPPWGYLPTRVDGEWRLVPDPVQRERILEVYHRVVDNHEPLHLVAHDLNRRGVLSPKDYFAQLQGREPQGREWSATALKRSMISEAMLGYATLNGKTVRDDDGAPLVRAEPILTREQLEALRAELVKTSRAKPAVSTPSLLLRVLFCAVCGEPAYKFAGGGRKHPRYRCRSMGFPKHCGNGTVAMAEWDAFCEEQVLDLLGDAERLEKVWVAGSDSAVELAEVNAELVDLTSLIGSPAYRAGSPQREALDARIAALAARQEELEGLEARPSGWEWRETGQRFGDWWREQDTAAKNTWLRSMNVRLTFDVRGGLTRTIDFGDLQEYEQHLRLGSVVERLHTGMSGSGKDGKKDKKEEDKK

SEQ ID NO: 668 - DNA, 1674 bp, synthetic construct
  source 1..1674: mol_type = other DNA
atgcccaagaagaagagaaaggtgtacccctacgacgtgcccgactacgccaaggacggcaagaaggacaagaaggaggaggacaagaagggcagcggccaaccgcggttcgcggccgctggcagcagagccctggtggtgatcagactgagcagagtgaccgacgccaccaccagccccgagagacagctggagagctgccagcagctgtgcgcccagagaggctgggacgtggtgggcgtggccgaggacctggacgtgagcggcgccgtggaccccttcgacagaaagagaagacccaacctggccagatggctggccttcgaggagcagcccttcgacgtgatcgtggcctacagagtggacagactgaccagaagcatcagacacctgcagcagctggtgcactgggccgaggaccacaagaagctggtggtgagcgccaccgaggcccacttcgacaccaccacccccttcgccgccgtggtgatcgccctgatgggcaccgtggcccagatggagctggaggccatcaaggagagaaacagaagcgccgcccacttcaacatcagagccggcaagtacagaggcagcctgcccccctggggctacctgcccaccagagtggacggcgagtggagactggtgcccgaccccgtgcagagagagagaatcctggaggtgtaccacagagtggtggacaaccacgagcccctgcacctggtggcccacgacctgaacagaagaggcgtgctgagccccaaggactacttcgcccagctgcagggcagagagccccagggcagagagtggagcgccaccgccctgaagagaagcatgatcagcgaggccatgctgggctacgccaccctgaacggcaagaccgtgagagacgacgacggcgcccccctggtgagagccgagcccatcctgaccagagagcagctggaggccctgagagccgagctggtgaagaccagcagagccaagcccgccgtgagcacccccagcctgctgctgagagtgctgttctgcgccgtgtgcggcgagcccgcctacaagttcgccggcggcggcagaaagcaccccagatacagatgcagaagcatgggcttccccaagcactgcggcaacggcaccgtggccatggccgagtgggacgccttctgcgaggagcaggtgctggacctgctgggcgacgccgagagactggagaaggtgtgggtggccggcagcgacagcgccgtggagctggccgaggtgaacgccgagctggtggacctgaccagcctgatcggcagccccgcctacagagccggcagcccccagagagaggccctggacgccagaatcgccgccctggccgccagacaggaggagctggagggcctggaggccagacccagcggctgggagtggagagagaccggccagagattcggcgactggtggagagagcaggacaccgccgccaagaacacctggctgagaagcatgaacgtgagactgaccttcgacgtgagaggcggcctgaccagaaccatcgacttcggcgacctgcaggagtacgagcagcacctgagactgggcagcgtggtggagagactgcacaccggcatgagcggcagcggcaaggacggcaagaaggacaagaaggaggaggacaagaagtga

SEQ ID NO: 669 - protein, 544 aa, synthetic construct
MPKKKRKVYPYDVPDYAKDGKKDKKEEDKKKDGKKDKKEEDKKGSRALVVIRLSRVTDATTSPERQLESCQQLCAQRGWDVVGVAEDLDVSGAVDPFDRKRRPNLARWLAFEEQPFDVIVAYRVDRLTRSIRHLQQLVHWAEDHKKLVVSATEAHFDTTTPFAAVVIALMGTVAQMELEAIKERNRSAAHFNIRAGKYRGSLPPWGYLPTRVDGEWRLVPDPVQRERILEVYHRVVDNHEPLHLVAHDLNRRGVLSPKDYFAQLQGREPQGREWSATALKRSMISEAMLGYATLNGKTVRDDDGAPLVRAEPILTREQLEALRAELVKTSRAKPAVSTPSLLLRVLFCAVCGEPAYKFAGGGRKHPRYRCRSMGFPKHCGNGTVAMAEWDAFCEEQVLDLLGDAERLEKVWVAGSDSAVELAEVNAELVDLTSLIGSPAYRAGSPQREALDARIAALAARQEELEGLEARPSGWEWRETGQRFGDWWREQDTAAKNTWLRSMNVRLTFDVRGGLTRTIDFGDLQEYEQHLRLGSVVERLHTGMS

SEQ ID NO: 670 - DNA, 1635 bp, synthetic construct
  source 1..1635: mol_type = other DNA
atgcccaagaagaagagaaaggtgtacccctacgacgtgcccgactacgccaaggacggcaagaaggacaagaaggaggaggacaagaagaaggacggcaagaaggacaagaaggaggaggacaagaagggcagcagagccctggtggtgatcagactgagcagagtgaccgacgccaccaccagccccgagagacagctggagagctgccagcagctgtgcgcccagagaggctgggacgtggtgggcgtggccgaggacctggacgtgagcggcgccgtggaccccttcgacagaaagagaagacccaacctggccagatggctggccttcgaggagcagcccttcgacgtgatcgtggcctacagagtggacagactgaccagaagcatcagacacctgcagcagctggtgcactgggccgaggaccacaagaagctggtggtgagcgccaccgaggcccacttcgacaccaccacccccttcgccgccgtggtgatcgccctgatgggcaccgtggcccagatggagctggaggccatcaaggagagaaacagaagcgccgcccacttcaacatcagagccggcaagtacagaggcagcctgcccccctggggctacctgcccaccagagtggacggcgagtggagactggtgcccgaccccgtgcagagagagagaatcctggaggtgtaccacagagtggtggacaaccacgagcccctgcacctggtggcccacgacctgaacagaagaggcgtgctgagccccaaggactacttcgcccagctgcagggcagagagccccagggcagagagtggagcgccaccgccctgaagagaagcatgatcagcgaggccatgctgggctacgccaccctgaacggcaagaccgtgagagacgacgacggcgcccccctggtgagagccgagcccatcctgaccagagagcagctggaggccctgagagccgagctggtgaagaccagcagagccaagcccgccgtgagcacccccagcctgctgctgagagtgctgttctgcgccgtgtgcggcgagcccgcctacaagttcgccggcggcggcagaaagcaccccagatacagatgcagaagcatgggcttccccaagcactgcggcaacggcaccgtggccatggccgagtgggacgccttctgcgaggagcaggtgctggacctgctgggcgacgccgagagactggagaaggtgtgggtggccggcagcgacagcgccgtggagctggccgaggtgaacgccgagctggtggacctgaccagcctgatcggcagccccgcctacagagccggcagcccccagagagaggccctggacgccagaatcgccgccctggccgccagacaggaggagctggagggcctggaggccagacccagcggctgggagtggagagagaccggccagagattcggcgactggtggagagagcaggacaccgccgccaagaacacctggctgagaagcatgaacgtgagactgaccttcgacgtgagaggcggcctgaccagaaccatcgacttcggcgacctgcaggagtacgagcagcacctgagactgggcagcgtggtggagagactgcacaccggcatgagctga

SEQ ID NO: 671 - protein, 560 aa, synthetic construct
MPKKKRKVYPYDVPDYAKDGKKDKKEEDKKKDGKKDKKEEDKKGSRALVVIRLSRVTDATTSPERQLESCQQLCAQRGWDVVGVAEDLDVSGAVDPFDRKRRPNLARWLAFEEQPFDVIVAYRVDRLTRSIRHLQQLVHWAEDHKKLVVSATEAHFDTTTPFAAVVIALMGTVAQMELEAIKERNRSAAHFNIRAGKYRGSLPPWGYLPTRVDGEWRLVPDPVQRERILEVYHRVVDNHEPLHLVAHDLNRRGVLSPKDYFAQLQGREPQGREWSATALKRSMISEAMLGYATLNGKTVRDDDGAPLVRAEPILTREQLEALRAELVKTSRAKPAVSTPSLLLRVLFCAVCGEPAYKFAGGGRKHPRYRCRSMGFPKHCGNGTVAMAEWDAFCEEQVLDLLGDAERLEKVWVAGSDSAVELAEVNAELVDLTSLIGSPAYRAGSPQREALDARIAALAARQEELEGLEARPSGWEWRETGQRFGDWWREQDTAAKNTWLRSMNVRLTFDVRGGLTRTIDFGDLQEYEQHLRLGSVVERLHTGMSGSGKDGKKDKKEEDKK

SEQ ID NO: 672 - DNA, 1683 bp, synthetic construct
  source 1..1683: mol_type = other DNA
atgcccaagaagaagagaaaggtgtacccctacgacgtgcccgactacgccaaggacggcaagaaggacaagaaggaggaggacaagaagaaggacggcaagaaggacaagaaggaggaggacaagaagggcagcagagccctggtggtgatcagactgagcagagtgaccgacgccaccaccagccccgagagacagctggagagctgccagcagctgtgcgcccagagaggctgggacgtggtgggcgtggccgaggacctggacgtgagcggcgccgtggaccccttcgacagaaagagaagacccaacctggccagatggctggccttcgaggagcagcccttcgacgtgatcgtggcctacagagtggacagactgaccagaagcatcagacacctgcagcagctggtgcactgggccgaggaccacaagaagctggtggtgagcgccaccgaggcccacttcgacaccaccacccccttcgccgccgtggtgatcgccctgatgggcaccgtggcccagatggagctggaggccatcaaggagagaaacagaagcgccgcccacttcaacatcagagccggcaagtacagaggcagcctgcccccctggggctacctgcccaccagagtggacggcgagtggagactggtgcccgaccccgtgcagagagagagaatcctggaggtgtaccacagagtggtggacaaccacgagcccctgcacctggtggcccacgacctgaacagaagaggcgtgctgagccccaaggactacttcgcccagctgcagggcagagagccccagggcagagagtggagcgccaccgccctgaagagaagcatgatcagcgaggccatgctgggctacgccaccctgaacggcaagaccgtgagagacgacgacggcgcccccctggtgagagccgagcccatcctgaccagagagcagctggaggccctgagagccgagctggtgaagaccagcagagccaagcccgccgtgagcacccccagcctgctgctgagagtgctgttctgcgccgtgtgcggcgagcccgcctacaagttcgccggcggcggcagaaagcaccccagatacagatgcagaagcatgggcttccccaagcactgcggcaacggcaccgtggccatggccgagtgggacgccttctgcgaggagcaggtgctggacctgctgggcgacgccgagagactggagaaggtgtgggtggccggcagcgacagcgccgtggagctggccgaggtgaacgccgagctggtggacctgaccagcctgatcggcagccccgcctacagagccggcagcccccagagagaggccctggacgccagaatcgccgccctggccgccagacaggaggagctggagggcctggaggccagacccagcggctgggagtggagagagaccggccagagattcggcgactggtggagagagcaggacaccgccgccaagaacacctggctgagaagcatgaacgtgagactgaccttcgacgtgagaggcggcctgaccagaaccatcgacttcggcgacctgcaggagtacgagcagcacctgagactgggcagcgtggtggagagactgcacaccggcatgagcggcagcggcaaggacggcaagaaggacaagaaggaggaggacaagaagtga

SEQ ID NO: 673 - protein, 573 aa, synthetic construct
MPKKKRKVYPYDVPDYAKDGKKDKKEEDKKKDGKKDKKEEDKKGSRALVVIRLSRVTDATTSPERQLESCQQLCAQRGWDVVGVAEDLDVSGAVDPFDRKRRPNLARWLAFEEQPFDVIVAYRVDRLTRSIRHLQQLVHWAEDHKKLVVSATEAHFDTTTPFAAVVIALMGTVAQMELEAIKERNRSAAHFNIRAGKYRGSLPPWGYLPTRVDGEWRLVPDPVQRERILEVYHRVVDNHEPLHLVAHDLNRRGVLSPKDYFAQLQGREPQGREWSATALKRSMISEAMLGYATLNGKTVRDDDGAPLVRAEPILTREQLEALRAELVKTSRAKPAVSTPSLLLRVLFCAVCGEPAYKFAGGGRKHPRYRCRSMGFPKHCGNGTVAMAEWDAFCEEQVLDLLGDAERLEKVWVAGSDSAVELAEVNAELVDLTSLIGSPAYRAGSPQREALDARIAALAARQEELEGLEARPSGWEWRETGQRFGDWWREQDTAAKNTWLRSMNVRLTFDVRGGLTRTIDFGDLQEYEQHLRLGSVVERLHTGMSGSGKDGKKDKKEEDKKKDGKKDKKEEDKK

SEQ ID NO: 674 - DNA, 1722 bp, synthetic construct
  source 1..1722: mol_type = other DNA
atgcccaagaagaagagaaaggtgtacccctacgacgtgcccgactacgccaaggacggcaagaaggacaagaaggaggaggacaagaagaaggacggcaagaaggacaagaaggaggaggacaagaagggcagcagagccctggtggtgatcagactgagcagagtgaccgacgccaccaccagccccgagagacagctggagagctgccagcagctgtgcgcccagagaggctgggacgtggtgggcgtggccgaggacctggacgtgagcggcgccgtggaccccttcgacagaaagagaagacccaacctggccagatggctggccttcgaggagcagcccttcgacgtgatcgtggcctacagagtggacagactgaccagaagcatcagacacctgcagcagctggtgcactgggccgaggaccacaagaagctggtggtgagcgccaccgaggcccacttcgacaccaccacccccttcgccgccgtggtgatcgccctgatgggcaccgtggcccagatggagctggaggccatcaaggagagaaacagaagcgccgcccacttcaacatcagagccggcaagtacagaggcagcctgcccccctggggctacctgcccaccagagtggacggcgagtggagactggtgcccgaccccgtgcagagagagagaatcctggaggtgtaccacagagtggtggacaaccacgagcccctgcacctggtggcccacgacctgaacagaagaggcgtgctgagccccaaggactacttcgcccagctgcagggcagagagccccagggcagagagtggagcgccaccgccctgaagagaagcatgatcagcgaggccatgctgggctacgccaccctgaacggcaagaccgtgagagacgacgacggcgcccccctggtgagagccgagcccatcctgaccagagagcagctggaggccctgagagccgagctggtgaagaccagcagagccaagcccgccgtgagcacccccagcctgctgctgagagtgctgttctgcgccgtgtgcggcgagcccgcctacaagttcgccggcggcggcagaaagcaccccagatacagatgcagaagcatgggcttccccaagcactgcggcaacggcaccgtggccatggccgagtgggacgccttctgcgaggagcaggtgctggacctgctgggcgacgccgagagactggagaaggtgtgggtggccggcagcgacagcgccgtggagctggccgaggtgaacgccgagctggtggacctgaccagcctgatcggcagccccgcctacagagccggcagcccccagagagaggccctggacgccagaatcgccgccctggccgccagacaggaggagctggagggcctggaggccagacccagcggctgggagtggagagagaccggccagagattcggcgactggtggagagagcaggacaccgccgccaagaacacctggctgagaagcatgaacgtgagactgaccttcgacgtgagaggcggcctgaccagaaccatcgacttcggcgacctgcaggagtacgagcagcacctgagactgggcagcgtggtggagagactgcacaccggcatgagcggcagcggcaaggacggcaagaaggacaagaaggaggaggacaagaagaaggacggcaagaaggacaagaaggaggaggacaagaagtga

SEQ ID NO: 675 - protein, 564 aa, synthetic construct
MPKKKRKVKDGKKDKKEEDKKKDGKKDKKEEDKKGSRALVVIRLSRVTDATTSPERQLESCQQLCAQRGWDVVGVAEDLDVSGAVDPFDRKRRPNLARWLAFEEQPFDVIVAYRVDRLTRSIRHLQQLVHWAEDHKKLVVSATEAHFDTTTPFAAVVIALMGTVAQMELEAIKERNRSAAHFNIRAGKYRGSLPPWGYLPTRVDGEWRLVPDPVQRERILEVYHRVVDNHEPLHLVAHDLNRRGVLSPKDYFAQLQGREPQGREWSATALKRSMISEAMLGYATLNGKTVRDDDGAPLVRAEPILTREQLEALRAELVKTSRAKPAVSTPSLLLRVLFCAVCGEPAYKFAGGGRKHPRYRCRSMGFPKHCGNGTVAMAEWDAFCEEQVLDLLGDAERLEKVWVAGSDSAVELAEVNAELVDLTSLIGSPAYRAGSPQREALDARIAALAARQEELEGLEARPSGWEWRETGQRFGDWWREQDTAAKNTWLRSMNVRLTFDVRGGLTRTIDFGDLQEYEQHLRLGSVVERLHTGMSGSGKDGKKDKKEEDKKKDGKKDKKEEDKK

SEQ ID NO: 676 - DNA, 1695 bp, synthetic construct
  source 1..1695: mol_type = other DNA
atgcccaagaagaagagaaaggtgaaggacggcaagaaggacaagaaggaggaggacaagaagaaggacggcaagaaggacaagaaggaggaggacaagaagggcagcagagccctggtggtgatcagactgagcagagtgaccgacgccaccaccagccccgagagacagctggagagctgccagcagctgtgcgcccagagaggctgggacgtggtgggcgtggccgaggacctggacgtgagcggcgccgtggaccccttcgacagaaagagaagacccaacctggccagatggctggccttcgaggagcagcccttcgacgtgatcgtggcctacagagtggacagactgaccagaagcatcagacacctgcagcagctggtgcactgggccgaggaccacaagaagctggtggtgagcgccaccgaggcccacttcgacaccaccacccccttcgccgccgtggtgatcgccctgatgggcaccgtggcccagatggagctggaggccatcaaggagagaaacagaagcgccgcccacttcaacatcagagccggcaagtacagaggcagcctgcccccctggggctacctgcccaccagagtggacggcgagtggagactggtgcccgaccccgtgcagagagagagaatcctggaggtgtaccacagagtggtggacaaccacgagcccctgcacctggtggcccacgacctgaacagaagaggcgtgctgagccccaaggactacttcgcccagctgcagggcagagagccccagggcagagagtggagcgccaccgccctgaagagaagcatgatcagcgaggccatgctgggctacgccaccctgaacggcaagaccgtgagagacgacgacggcgcccccctggtgagagccgagcccatcctgaccagagagcagctggaggccctgagagccgagctggtgaagaccagcagagccaagcccgccgtgagcacccccagcctgctgctgagagtgctgttctgcgccgtgtgcggcgagcccgcctacaagttcgccggcggcggcagaaagcaccccagatacagatgcagaagcatgggcttccccaagcactgcggcaacggcaccgtggccatggccgagtgggacgccttctgcgaggagcaggtgctggacctgctgggcgacgccgagagactggagaaggtgtgggtggccggcagcgacagcgccgtggagctggccgaggtgaacgccgagctggtggacctgaccagcctgatcggcagccccgcctacagagccggcagcccccagagagaggccctggacgccagaatcgccgccctggccgccagacaggaggagctggagggcctggaggccagacccagcggctgggagtggagagagaccggccagagattcggcgactggtggagagagcaggacaccgccgccaagaacacctggctgagaagcatgaacgtgagactgaccttcgacgtgagaggcggcctgaccagaaccatcgacttcggcgacctgcaggagtacgagcagcacctgagactgggcagcgtggtggagagactgcacaccggcatgagcggcagcggcaaggacggcaagaaggacaagaaggaggaggacaagaagaaggacggcaagaaggacaagaaggaggaggacaagaagtga

SEQ ID NO: 677 - protein, 4 aa, synthetic construct
GGGS

SEQ ID NO: 678 - protein, 12 aa, synthetic construct
GGGSGGGSGGGS

SEQ ID NO: 679 - DNA, 180 bp, synthetic construct
  source 1..180: mol_type = other DNA
cgagtggtgcgacgtctggctttcggtgccctagtgatgagaaatatgtatttcgttcttgcagcttgtcagtactttcagaatcatggtctgcatggtagaatggccggcttgtcgacgacggcggtctccgtcgtcaggatcatccggtcgctatctagcgagttcgcgcgctctgtg

SEQ ID NO: 680 - DNA, 220 bp, synthetic construct
  source 1..220: mol_type = other DNA
gtgtagcgtcgctacgcgccattgtcagcacaagatgggtttgtctggtcaaccaccgcggtctcagtggtgtacggtacaaaccaccatgaaggctagaattacttaccggcctttaccatgcctgcactatacgcacctactttcccgtttatctgtccaagcagatacaatgcgatcctccgttaagatattcttacgtgcgacgtcgccgtggatg

SEQ ID NO: 681 - DNA, 286 bp, synthetic construct
  source 1..286: mol_type = other DNA
cgagtggtgcgacgtctggctttcggtgccctagtgatgagaaatatgtatttcgttcttgcagcttgtcagtactttcagaatcatggtctgcatggtagaatggccggcttgtcgacgacggcggtctcagtggtgtacggtacaaacccacatgaaggctagaattacttaccggcctttaccatgcctgcactatacgcacctactttcccgtttatctgtccaagcagatacaatgcgatcctccgttaagatattcttacgtgcgacgtcgccgtggatg

SEQ ID NO: 682 - DNA, 114 bp, synthetic construct
  source 1..114: mol_type = other DNA
gtgtagcgtcgctacgcgccattgtcagcacaagagtggtttgtctggtcaaccaccgcggtctccgtcgtcaggatcatccggtcgctatctagcgagttcgcgcgctctgtg

SEQ ID NO: 683 - DNA, 195 bp, synthetic construct
  source 1..195: mol_type = other DNA
cgagtggtgcgacgtctggctttcggtgccctagtgatgagaaatatgtatttcgttcttgcagcttgtcagtactttcagaatcatggtctgcatggtagaataagcacgacctccacaacagaggttgctgttgtggaggttgctcaatcgctatctagttgagtaagagctggcgagttcgcgcgctctgtg

SEQ ID NO: 684 - DNA, 195 bp, synthetic construct
  source 1..195: mol_type = other DNA
cgagtggtgcgacgtctggctttcggtgccctagtgatgagaaatatgtatttcgttcttgcagcttgtcagtactttcagaatcatggtctgcatggtagaatgtttggtttgtttgcaacggcagtgacggaggttgggagccaggcttcgctatctagttgagtaagagctggcgagttcgcgcgctctgtg

SEQ ID NO: 685 - DNA, 180 bp, synthetic construct
  source 1..180: mol_type = other DNA
cgagtggtgcgacgtctggctttcggtgccctagtgatgagaaatatgtatttcgttcttgcagcttgtcagtactttcagaatcatggtctgcatggtagaatttacggcttgtcgacgacggcggtctccgtcgtcaggatcatcatttcgctatctagcgagttcgcgcgctctgtg

SEQ ID NO: 686 - DNA, 180 bp, synthetic construct
  source 1..180: mol_type = other DNA
cgagtggtgcgacgtctggctttcggtgccctagtgatgagaaatatgtatttcgttcttgcagcttgtcagtactttcagaatcatggtctgcatggtagaatttaaggcttgtcgacgacggcggtctccgtcgtcaggatcataatttcgctatctagcgagttcgcgcgctctgtg

SEQ ID NO: 687 - DNA, 180 bp, synthetic construct
  source 1..180: mol_type = other DNA
cgagtggtgcgacgtctggctttcggtgccctagtgatgagaaatatgtatttcgttcttgcagcttgtcagtactttcagaatcatggtctgcatggtagaatttaatgcttgtcgacgacggcggtctccgtcgtcaggatcagaatttcgctatctagcgagttcgcgcgctctgtg

SEQ ID NO: 688 - DNA, 180 bp, synthetic construct
  source 1..180: mol_type = other DNA
cgagtggtgcgacgtctggctttcggtgccctagtgatgagaaatatgtatttcgttcttgcagcttgtcagtactttcagaatcatggtctgcatggtagaatttaattcttgtcgacgacggcggtctccgtcgtcaggatccgaatttcgctatctagcgagttcgcgcgctctgtg

SEQ ID NO: 689 - DNA, 179 bp, synthetic construct
  source 1..179: mol_type = other DNA
cgagtggtgcgacgtctggctttcggtgccctagtgatgagaaatagtatttcgttcttgcagcttgtcagtactttcagaatcatggtctgcatggtagaatttaattattgtcgacgacggcggtctccgtcgtcaggatacgaatttcgctatctagcgagttcgcgcgctctgtg

SEQ ID NO: 690 - DNA, 180 bp, synthetic construct
  source 1..180: mol_type = other DNA
cgagtggtgcgacgtctggctttcggtgccctagtgatgagaaatatgtatttcgttcttgcagcttgtcagtactttcagaatcatggtctgcatggtagaatttaattagtgtcgacgacggcggtctccgtcgtcaggagacgaatttcgctatctagcgagttcgcgcgctctgtg

SEQ ID NO: 691 - DNA, 20 bp, synthetic construct
  source 1..20: mol_type = other DNA
cgagtggtgcgacgtctggc

SEQ ID NO: 692 - DNA, 20 bp, synthetic construct
  source 1..20: mol_type = other DNA
gcgagttcgcgcgctctgtg

SEQ ID NO: 693 - DNA, 20 bp, synthetic construct
  source 1..20: mol_type = other DNA
gtgtagcgtcgctacgcgcc

SEQ ID NO: 694 - DNA, 20 bp, synthetic construct
  source 1..20: mol_type = other DNA
catccacggcgacgtcgcac

SEQ ID NO: 695 - DNA, 20 bp, synthetic construct
  source 1..20: mol_type = other DNA
taccatccactcgacacacc

SEQ ID NO: 696 - DNA, 17 bp, synthetic construct
  source 1..17: mol_type = other DNA
gaactccacgccgttca

SEQ ID NO: 697 - DNA, 25 bp, synthetic construct
  source 1..25: mol_type = other DNA
cttgtcgacgacggcggtctcagtg

SEQ ID NO: 698 - DNA, 21 bp, synthetic construct
  source 1..21: mol_type = other DNA
gctttgttccttgggttcttg

SEQ ID NO: 699 - DNA, 20 bp, synthetic construct
  source 1..20: mol_type = other DNA
ttctgctgctgcactatacc

SEQ ID NO: 700 - DNA, 24 bp, synthetic construct
  source 1..24: mol_type = other DNA
aattgtctggcctgtaccgtcagc

SEQ ID NO: 701 - DNA, 22 bp, synthetic construct
  source 1..22: mol_type = other DNA
gtaagagcctggcttaatgagc

SEQ ID NO: 702 - DNA, 30 bp, synthetic construct
  source 1..30: mol_type = other DNA
cctccacaacagaggtctcagtggtgtacg

SEQ ID NO: 703 - DNA, 24 bp, synthetic construct
  source 1..24: mol_type = other DNA
gtgatgttgtaagttttccacagc

SEQ ID NO: 704 - DNA, 24 bp, synthetic construct
  source 1..24: mol_type = other DNA
ggagcttagcaatctctctgattt

SEQ ID NO: 705 - DNA, 28 bp, synthetic construct
  source 1..28: mol_type = other DNA
agacttccctttcttctgccactgccac

SEQ ID NO: 706 - DNA, 23 bp, synthetic construct
  source 1..23: mol_type = other DNA
ggagtccaaccttaagtctcttg

SEQ ID NO: 707 - DNA, 20 bp, synthetic construct
  source 1..20: mol_type = other DNA
ggttcaggatcttgttggcg

SEQ ID NO: 708 - DNA, 19 bp, synthetic construct
  source 1..19: mol_type = other DNA
gcaacttgggctaccagat

SEQ ID NO: 709 - DNA, 23 bp, synthetic construct
  source 1..23: mol_type = other DNA
gctgttttgtttccactgtgtac

SEQ ID NO: 710 - DNA, 22 bp, synthetic construct
  source 1..22: mol_type = other DNA
cggtctccgtcgtcaggatcat

SEQ ID NO: 711 - DNA, 20 bp, synthetic construct
  source 1..20: mol_type = other DNA
agtataccagctagcaggcc

SEQ ID NO: 712 - DNA, 21 bp, synthetic construct
  source 1..21: mol_type = other DNA
gcagagaactcccagaaaggt

SEQ ID NO: 713 - protein, 518 aa, synthetic construct
MPKKKRKVYPYDVPDYAGSRALVVIRLSRVTDATTSPERQLESCQQLCAQRGWDVVGVAEDLDVSGAVDPFDRKRRPNLARWLAFEEQPFDVIVAYRVDRLTRSIRHLQQLVHWAEDHKKLVVSATEAHFDTTTPFAAVVIALMGTVAQMELEAIKERNRSAAHFNIRAGKYRGSLPPWGYLPTRVDGEWRLVPDPVQRERILEVYHRVVDNHEPLHLVAHDLNRRGVLSPKDYFAQLQGREPQGREWSATALKRSMISEAMLGYATLNGKTVRDDDGAPLVRAEPILTREQLEALRAELVKTSRAKPAVSTPSLLLRVLFCAVCGEPAYKFAGGGRKHPRYRCRSMGFPKHCGNGTVAMAEWDAFCEEQVLDLLGDAERLEKVWVAGSDSAVELAEVNAELVDLTSLIGSPAYRAGSPQREALDARIAALAARQEELEGLEARPSGWEWRETGQRFGDWWREQDTAAKNTWLRSMNVRLTFDVRGGLTRTIDFGDLQEYEQHLRLGSVVERLHTGMS

SEQ ID NO: 714 - protein, 510 aa, synthetic construct
MPKKKRKVGSGRALVVIRLSRVTDATTSPERQLESCQQLCAQRGWDVVGVAEDLDVSGAVDPFDRKRRPNLARWLAFEEQPFDVIVAYRVDRLTRSIRHLQQLVHWAEDHKKLVVSATEAHFDTTTPFAAVVIALMGTVAQMELEAIKERNRSAAHFNIRAGKYRGSLPPWGYLPTRVDGEWRLVPDPVQRERILEVYHRVVDNHEPLHLVAHDLNRRGVLSPKDYFAQLQGREPQGREWSATALKRSMISEAMLGYATLNGKTVRDDDGAPLVRAEPILTREQLEALRAELVKTSRAKPAVSTPSLLLRVLFCAVCGEPAYKFAGGGRKHPRYRCRSMGFPKHCGNGTVAMAEWDAFCEEQVLDLLGDAERLEKVWVAGSDSAVELAEVNAELVDLTSLIGSPAYRAGSPQREALDARIAALAARQEELEGLEARPSGWEWRETGQRFGDWWREQDTAAKNTWLRSMNVRLTFDVRGGLTRTIDFGDLQEYEQHLRLGSVVERLHTGMS

SEQ ID NO: 715 - protein, 557 aa, synthetic construct
MPKKKRKVAYDPVDYPYQPRFAAAGSGKDKKSDGKDSQKKGSRALVVIRLSRVTDATTSPERQLESCQQLCAQRGWDVVGVAEDLDVSGAVDPFDRKRRPNLARWLAFEEQPFDVIVAYRVDRLTRSIRHLQQLVHWAEDHKKLVVSATEAHFDTTTPFAAVVIALMGTVAQMELEAIKERNRSAAHFNIRAGKYRGSLPPWGYLPTRVDGEWRLVPDPVQRERILEVYHRVVDNHEPLHLVAHDLNRRGVLSPKDYFAQLQGREPQGREWSATALKRSMISEAMLGYATLNGKTVRDDDGAPLVRAEPILTREQLEALRAELVKTSRAKPAVSTPSLLLRVLFCAVCGEPAYKFAGGGRKHPRYRCRSMGFPKHCGNGTVAMAEWDAFCEEQVLDLLGDAERLEKVWVAGSDSAVELAEVNAELVDLTSLIGSPAYRAGSPQREALDARIAALAARQEELEGLEARPSGWEWRETGQRFGDWWREQDTAAKNTWLRSMNVRLTFDVRGGLTRTIDFGDLQEYEQHLRLGSVVERLHTGMSGSGKDKKSDGKDSQKK

SEQ ID NO: 716 - protein, 557 aa, synthetic construct
MPKKKRKVYPYELPEYGQPRFAAAGSGKDKKSDGKDSQKKGSRALVVIRLSRVTDATTSPERQLESCQQLCAQRGWDVVGVAEDLDVSGAVDPFDRKRRPNLARWLAFEEQPFDVIVAYRVDRLTRSIRHLQQLVHWAEDHKKLVVSATEAHFDTTTPFAAVVIALMGTVAQMELEAIKERNRSAAHFNIRAGKYRGSLPPWGYLPTRVDGEWRLVPDPVQRERILEVYHRVVDNHEPLHLVAHDLNRRGVLSPKDYFAQLQGREPQGREWSATALKRSMISEAMLGYATLNGKTVRDDDGAPLVRAEPILTREQLEALRAELVKTSRAKPAVSTPSLLLRVLFCAVCGEPAYKFAGGGRKHPRYRCRSMGFPKHCGNGTVAMAEWDAFCEEQVLDLLGDAERLEKVWVAGSDSAVELAEVNAELVDLTSLIGSPAYRAGSPQREALDARIAALAARQEELEGLEARPSGWEWRETGQRFGDWWREQDTAAKNTWLRSMNVRLTFDVRGGLTRTIDFGDLQEYEQHLRLGSVVERLHTGMSGSGKDKKSDGKDSQKK

SEQ ID NO: 717 - protein, 558 aa, synthetic construct
MPKKKRKVGGGGSGGGGSQPRFAAAGSGKDKKSDGKDSQKKGSRALVVIRLSRVTDATTSPERQLESCQQLCAQRGWDVVGVAEDLDVSGAVDPFDRKRRPNLARWLAFEEQPFDVIVAYRVDRLTRSIRHLQQLVHWAEDHKKLVVSATEAHFDTTTPFAAVVIALMGTVAQMELEAIKERNRSAAHFNIRAGKYRGSLPPWGYLPTRVDGEWRLVPDPVQRERILEVYHRVVDNHEPLHLVAHDLNRRGVLSPKDYFAQLQGREPQGREWSATALKRSMISEAMLGYATLNGKTVRDDDGAPLVRAEPILTREQLEALRAELVKTSRAKPAVSTPSLLLRVLFCAVCGEPAYKFAGGGRKHPRYRCRSMGFPKHCGNGTVAMAEWDAFCEEQVLDLLGDAERLEKVWVAGSDSAVELAEVNAELVDLTSLIGSPAYRAGSPQREALDARIAALAARQEELEGLEARPSGWEWRETGQRFGDWWREQDTAAKNTWLRSMNVRLTFDVRGGLTRTIDFGDLQEYEQHLRLGSVVERLHTGMSGSGKDKKSDGKDSQKK

SEQ ID NO: 718 - protein, 557 aa, synthetic construct
MPKKKRKVQFELADPYTQPRFAAAGSGKDKKSDGKDSQKKGSRALVVIRLSRVTDATTSPERQLESCQQLCAQRGWDVVGVAEDLDVSGAVDPFDRKRRPNLARWLAFEEQPFDVIVAYRVDRLTRSIRHLQQLVHWAEDHKKLVVSATEAHFDTTTPFAAVVIALMGTVAQMELEAIKERNRSAAHFNIRAGKYRGSLPPWGYLPTRVDGEWRLVPDPVQRERILEVYHRVVDNHEPLHLVAHDLNRRGVLSPKDYFAQLQGREPQGREWSATALKRSMISEAMLGYATLNGKTVRDDDGAPLVRAEPILTREQLEALRAELVKTSRAKPAVSTPSLLLRVLFCAVCGEPAYKFAGGGRKHPRYRCRSMGFPKHCGNGTVAMAEWDAFCEEQVLDLLGDAERLEKVWVAGSDSAVELAEVNAELVDLTSLIGSPAYRAGSPQREALDARIAALAARQEELEGLEARPSGWEWRETGQRFGDWWREQDTAAKNTWLRSMNVRLTFDVRGGLTRTIDFGDLQEYEQHLRLGSVVERLHTGMSGSGKDKKSDGKDSQKK

SEQ ID NO: 719 - protein, 558 aa, synthetic construct
MPKKKRKVGGGGSGGGGSQPRFAAAGSGKDKKSDGKDSQKKGSRALVVIRLSRVTDATTSPERQLESCQQLCAQRGWDVVGVAEDLDVSGAVDPFDRKRRPNLARWLAFEEQPFDVIVAYRVDRLTRSIRHLQQLVHWAEDHKKLVVSATEAHFDTTTPFAAVVIALMGTVAQMELEAIKERNRSAAHFNIRAGKYRGSLPPWGYLPTRVDGEWRLVPDPVQRERILEVYHRVVDNHEPLHLVAHDLNRRGVLSPKDYFAQLQGREPQGREWSATALKRSMISEAMLGYATLNGKTVRDDDGAPLVRAEPILTREQLEALRAELVKTSRAKPAVSTPSLLLRVLFCAVCGEPAYKFRGGGRKHPRYRCRSMGFPKHCGNGTVAMAEWDAFCEEQVLDLLGDAERLEKVWVAGSDSAVELAEVNAELVDLTSLIGSPAYRAGSPQREALDARIAALAARQEELEGLEARPSGWEWRETGQRFGDWWREQDTAAKNTWLRSMNVRLTFDVRGGLTRTIDFGDLQEYEQHLRLGSVVERLHTGMSGSGKDKKSDGKDSQKK

SEQ ID NO: 720 - protein, 557 aa, synthetic construct
MPKKKRKVQFELADPYTQPRFAAAGSGKDKKSDGKDSQKKGSRALVVIRLSRVTDATTSPERQLESCQQLCAQRGWDVVGVAEDLDVSGAVDPFDRKRRPNLARWLAFEEQPFDVIVAYRVDRLTRSIRHLQQLVHWAEDHKKLVVSATEAHFDTTTPFAAVVIALMGTVAQMELEAIKERNRSAAHFNIRAGKYRGSLPPWGYLPTRVDGEWRLVPDPVQRERILEVYHRVVDNHEPLHLVAHDLNRRGVLSPKDYFAQLQGREPQGREWSATALKRSMISEAMLGYATLNGKTVRDDDGAPLVRAEPILTREQLEALRAELVKTSRAKPAVSTPSLLLRVLFCAVCGEPAYKFRGGGRKHPRYRCRSMGFPKHCGNGTVAMAEWDAFCEEQVLDLLGDAERLEKVWVAGSDSAVELAEVNAELVDLTSLIGSPAYRAGSPQREALDARIAALAARQEELEGLEARPSGWEWRETGQRFGDWWREQDTAAKNTWLRSMNVRLTFDVRGGLTRTIDFGDLQEYEQHLRLGSVVERLHTGMSGSGKDKKSDGKDSQKK

SEQ ID NO: 721 - RNA, 80 nt, synthetic construct
  source 1..80: mol_type = other RNA
aaaaaaaaaaaaaaaaaaaaaaaaaaaaaaaaaaaaaaaaaaaaaaaaaaaaaaaaaaaaaaaaaaaaaaaaaaaaaaaa

SEQ ID NO: 722 - RNA, 30 nt, synthetic construct
  source 1..30: mol_type = other RNA
  variation 30: note = A residue can be repeated up to forty times
aaaaaaaaaaaaaaaaaaaaaaaaaaaaaa

SEQ ID NO: 723 - RNA, 110 nt, synthetic construct
  source 1..110: mol_type = other RNA
aaaaaaaaaaaaaaaaaaaaaaaaaaaaaaaaaaaaaaaaaaaaaaaaaaaaaaaaaaaaaaaaaaaaaaaaaaaaaaaaaaaaaaaaaaaaaaaaaaaaaaaaaaaaaa

SEQ ID NO: 724 - protein, 48 aa, synthetic construct
RLEIRAAFLRQRNTALRTEVAELEQEVQRLENEVSQYETRYGPLGGGK

SEQ ID NO: 725 - protein, 80 aa, synthetic construct
LEIEAAFLERENTALETRVAELRQRVQRLRNRVSQYRTRYGPLGGGKSGGSSGGSSGSETPGTSESATPESSGGSSGGSS

SEQ ID NO: 726 - protein, 47 aa, synthetic construct
LEIEAAFLEQENTALETEVAELEQEVQRLENIVSQYETRYGPLGGGK

SEQ ID NO: 727 - protein, 47 aa, synthetic construct
KGGGLEIRAAFLRRRNTALRTRVAELRQRVQRLRNIVSQYETRYGPL

SEQ ID NO: 728 - RNA, 142 nt, synthetic construct; identical to SEQ ID NO: 611
  source 1..142: mol_type = other RNA
  modified_base order(1..3,29..40,69..96,139..142): mod_base = OTHER; note = 2-Prime-O-methyl ribonucleotides
  modified_base order(1..4,139..142): mod_base = OTHER; note = Phosphorothioate linkages

SEQ ID NO: 729 - RNA, 142 nt, synthetic construct; identical to SEQ ID NO: 612
  source 1..142: mol_type = other RNA
  modified_base order(1..4,138..142): mod_base = OTHER; note = Phosphorothioate linkages
  modified_base order(1..3,29..40,69..96,139..142): mod_base = OTHER; note = 2-Prime-O-methyl ribonucleotides

SEQ ID NO: 730 - RNA, 138 nt, synthetic construct; identical to SEQ ID NO: 613
  source 1..138: mol_type = other RNA
  modified_base order(1..4,135..138): mod_base = OTHER; note = Phosphorothioate linkages
  modified_base order(1..3,136..138): mod_base = OTHER; note = 2-Prime-O-methyl ribonucleotides

SEQ ID NO: 731 - RNA, 138 nt, synthetic construct; identical to SEQ ID NO: 614
  source 1..138: mol_type = other RNA
  modified_base order(1..3,136..138): mod_base = OTHER; note = 2-Prime-O-methyl ribonucleotides
  modified_base order(1..4,135..138): mod_base = OTHER; note = Phosphorothioate linkages

SEQ ID NO: 732 - DNA, 50 bp, synthetic construct
  source 1..50: mol_type = other DNA
aggtttgtctggtcaaccaccgcggtctcagtggtgtacggtacaaacct

SEQ ID NO: 733 - DNA, 46 bp, synthetic construct
  source 1..46: mol_type = other DNA
taccctggcttcttctacagaggtctctgtcttttaaattttgtca

SEQ ID NO: 734 - DNA, 46 bp, synthetic construct
  source 1..46: mol_type = other DNA
tccaggcttgtccacagttgtagtctccatgggagaagcagcttct

SEQ ID NO: 735 - DNA, 46 bp, synthetic construct
  source 1..46: mol_type = other DNA
ccgtgcagcttcagcctctgccgtctcagctgagcaagcaggaggc

SEQ ID NO: 736 - DNA, 46 bp, synthetic construct
  source 1..46: mol_type = other DNA
aagcacgacctccacaacagaggttgctgttgtggaggttgctcaa

SEQ ID NO: 737 - DNA, 46 bp, synthetic construct
  source 1..46: mol_type = other DNA
aggaacaccttacaattctgcggtctctggcgttggaagcgtctac

SEQ ID NO: 738 - DNA, 46 bp, synthetic construct
  source 1..46: mol_type = other DNA
gtttggtttgtttgcaacggcagtgacggaggttgggagccaggct

SEQ ID NO: 739 - protein, 500 aa, synthetic construct
MRALVVIRLSRVIDATTSPERQLESCQQLCAQRGWDVVGVAEDLDVSGAVDPFDRKRRPNLARWLAFEEQPFDVIVAYRVDRLTRSIRHLQQLVHWAEDHKKLVVSATEAHFDTTTPFAAVVIALMGTVAQMELEAIKERNRSAAHFNIRAGKYRGSLPPWGYLPTRVDGEWRLVPDPVQRERILEVYHRVVDNHEPLHLVAHDLNRRGVLSPKDYFAQLQGREPQGREWSATALKRSMISEAMLGYATLNGKTVRDDDGAPLVRAEPILTREQLEALRAELVKTSRAKPAVSTPSLLLRVLFCAVCGEPAYKFAGGGRKHPRYRCRSMGFPKHCGNGTVAMAEWDAFCEEQVLDLLGDAERLEKVWVAGSDSAVELAEVNAELVDLTSLIGSPAYRAGSPOREALDARIAALAARQEELEGLEARPSGWEWRETGQRFGDWWREQDTAAKNTWLRSMNVRLTFDVRGGLTRTIDFGDLQEYEQHLRLGSVVERLHTGMS

SEQ ID NO: 740 - protein, 7 aa, synthetic construct
PKKKRKV

SEQ ID NO: 741 - protein, 9 aa, synthetic construct
YPYDVPDYA

SEQ ID NO: 742 - protein, 13 aa, synthetic construct
KDGKKDKKEEDKK

SEQ ID NO: 743 - protein, 9 aa, synthetic construct
AYDPVDYPY

SEQ ID NO: 744 - protein, 9 aa, synthetic construct
YPYELPEYG

SEQ ID NO: 745 - protein, 10 aa, synthetic construct
GGGGSGGGGS

SEQ ID NO: 746 - protein, 9 aa, synthetic construct
QFELADPYT

SEQ ID NO: 747 - protein, 1470 aa, synthetic construct
MKRTADGSEFESPKKKRKVDKKYSIGLDIGTNSVGWAVITDEYKVPSKKFKVLGNTDRHSIKKNLIGALLFDSGETAEATRLKRTARRRYTRRKNRICYLQEIFSNEMAKVDDSFFHRLEESFLVEEDKKHERHPIFGNIVDEVAYHEKYPTIYHLRKKLVDSTDKADLRLIYLALAHMIKFRGHFLIEGDLNPDNSDVDKLFIQLVQTYNQLFEENPINASGVDAKAILSARLSKSRRLENLIAQLPGEKKNGLFGNLIALSLGLTPNFKSNFDLAEDAKLQLSKDTYDDDLDNLLAQIGDQYADLFLAAKNLSDAILLSDILRVNTEITKAPLSASMIKRYDEHHQDLTLLKALVRQQLPEKYKEIFFDQSKNGYAGYIDGGASQEEFYKFIKPILEKMDGTEELLVKLNREDLLRKQRTFDNGSIPHQIHLGELHAILRRQEDFYPFLKDNREKIEKILTFRIPYYVGPLARGNSRFAWMTRKSEETITPWNFEEVVDKGASAQSFIERMTNFDKNLPNEKVLPKHSLLYEYFTVYNELTKVKYVTEGMRKPAFLSGEQKKAIVDLLFKTNRKVTVKQLKEDYFKKIECFDSVEISGVEDRFNASLGTYHDLLKIIKDKDFLDNEENEDILEDIVLTLTLFEDREMIEERLKTYAHLFDDKVMKQLKRRRYTGWGRLSRKLINGIRDKQSGKTILDFLKSDGFANRNFMQLIHDDSLTFKEDIQKAQVSGQGDSLHEHIANLAGSPAIKKGILQTVKVVDELVKVMGRHKPENIVIEMARENQTTQKGQKNSRERMKRIEEGIKELGSQILKEHPVENTQLQNEKLYLYYLQNGRDMYVDQELDINRLSDYDVDAIVPQSFLKDDSIDNKVLTRSDKNRGKSDNVPSEEVVKKMKNYWRQLLNAKLITQRKFDNLTKAERGGLSELDKAGFIKRQLVETRQITKHVAQILDSRMNTKYDENDKLIREVKVITLKSKLVSDFRKDFQFYKVREINNYHHAHDAYLNAVVGTALIKKYPKLESEFVYGDYKVYDVRKMIAKSEQEIGKATAKYFFYSNIMNFFKTEITLANGEIRKRPLIETNGETGEIVWDKGRDFATVRKVLSMPQVNIVKKTEVQTGGFSKESILPKRNSDKLIARKKDWDPKKYGGFDSPTVAYSVLVVAKVEKGKSKKLKSVKELLGITIMERSSFEKNPIDFLEAKGYKEVKKDLIIKLPKYSLFELENGRKRMLASAGELQKGNELALPSKYVNFLYLASHYEKLKGSPEDNEQKQLFVEQHKHYLDEIIEQISEFSKRVILADANLDKVLSAYNKHRDKPIREQAENIIHLFTLTNLGAPAAFKYFDTTIDRKRYTSTKEVLDATLIHQSITGLYETRIDLSQLGGDGSGSGEELLSKNYHLENEVARLKKGSGSGEELLSKNYHLENEVARLKKSGGSKRTADGSEFESPKKKRKVGGSVSGWRLFKKIS

SEQ ID NO: 748 - protein, 979 aa, synthetic construct
MKRTADGSEFESPKKKRKVGPDIVMTQSPSSLSASVGDRVTITCRSSTGAVTTSNYASWVQEKPGKLFKGLIGGTNNRAPGVPSRFSGSLIGDKATLTISSLQPEDFATYFCALWYSNHWVFGQGTKVELKRGGGGSGGGGSGGGGSSGGGSEVKLLESGGGLVQPGGSLKLSCAVSGFSLTDYGVNWVRQAPGRGLEWIGVIWGDGITDYNSALKDRFIISKDNGKNTVYLQMSKVRSDDTALYYCVTGLFDYWGQGTLVTVSSGSGLNIEDEYRLHETSKEPDVSLGSTWLSDFPQAWAETGGMGLAVRQAPLIIPLKATSTPVSIKQYPMSQEARLGIKPHIQRLLDQGILVPCQSPWNTPLLPVKKPGTNDYRPVQDLREVNKRVEDIHPTVPNPYNLLSGLPPSHQWYTVLDLKDAFFCLRLHPTSQPLFAFEWRDPEMGISGQLTWTRLPQGFKNSPTLFNEALHRDLADFRIQHPDLILLQYVDDLLLAATSELDCQQGTRALLQTLGNLGYRASAKKAQICQKQVKYLGYLLKEGQRWLTEARKETVMGQPTPKTPRQLREFLGKAGFCRLFIPGFAEMAAPLYPLTKPGTLFNWGPDQQKAYQEIKQALLTAPALGLPDLTKPFELFVDEKQGYAKGVLTQKLGPWRRPVAYLSKKLDPVAAGWPPCLRMVAAIAVLTKDAGKLTMGQPLVILAPHAVEALVKQPPDRWLSNARMTHYQALLLDTDRVQFGPVVALNPATLLPLPEEGLQHNCLDILAEAHGTRPDLTDQPLPDADHTWYTDGSSLLQEGQRKAGAAVTTETEVIWAKALPAGTSAQRAELIALTQALKMAEGKKLNVYTDSRYAFATAHIHGEIYRRRGWLTSEGKEIKNKDEILALLKALFLPKRLSIIHCPGHQKGHSAEARGNRMADQAARKAAITETPDTSTLLIENSSPSGGSKRTADGSEFEPKKKRKVGGSVSGWRLFKKIS

SEQ ID NO: 749 - protein, 1452 aa, synthetic construct
MKRTADGSEFESPKKKRKVDKKYSIGLDIGTNSVGWAVITDEYKVPSKKFKVLGNTDRHSIKKNLIGALLFDSGETAEATRLKRTARRRYTRRKNRICYLQEIFSNEMAKVDDSFFHRLEESFLVEEDKKHERHPIFGNIVDEVAYHEKYPTIYHLRKKLVDSTDKADLRLIYLALAHMIKFRGHFLIEGDLNPDNSDVDKLFIQLVQTYNQLFEENPINASGVDAKAILSARLSKSRRLENLIAQLPGEKKNGLFGNLIALSLGLTPNFKSNFDLAEDAKLQLSKDTYDDDLDNLLAQIGDQYADLFLAAKNLSDAILLSDILRVNTEITKAPLSASMIKRYDEHHQDLTLLKALVRQQLPEKYKEIFFDQSKNGYAGYIDGGASQEEFYKFIKPILEKMDGTEELLVKLNREDLLRKQRTFDNGSIPHQIHLGELHAILRRQEDFYPFLKDNREKIEKILTFRIPYYVGPLARGNSRFAWMTRKSEETITPWNFEEVVDKGASAQSFIERMTNFDKNLPNEKVLPKHSLLYEYFTVYNELTKVKYVTEGMRKPAFLSGEQKKAIVDLLFKTNRKVTVKQLKEDYFKKIECFDSVEISGVEDRFNASLGTYHDLLKIIKDKDFLDNEENEDILEDIVLTLTLFEDREMIEERLKTYAHLFDDKVMKQLKRRRYTGWGRLSRKLINGIRDKQSGKTILDFLKSDGFANRNFMQLIHDDSLTFKEDIQKAQVSGQGDSLHEHIANLAGSPAIKKGILQTVKVVDELVKVMGRHKPENIVIEMARENQTTQKGQKNSRERMKRIEEGIKELGSQILKEHPVENTQLQNEKLYLYYLQNGRDMYVDQELDINRLSDYDVDAIVPQSFLKDDSIDNKVLTRSDKNRGKSDNVPSEEVVKKMKNYWRQLLNAKLITQRKFDNLTKAERGGLSELDKAGFIKRQLVETRQITKHVAQILDSRMNTKYDENDKLIREVKVITLKSKLVSDFRKDFQFYKVREINNYHHAHDAYLNAVVGTALIKKYPKLESEFVYGDYKVYDVRKMIAKSEQEIGKATAKYFFYSNIMNFFKTEITLANGEIRKRPLIETNGETGEIVWDKGRDFATVRKVLSMPQVNIVKKTEVQTGGFSKESILPKRNSDKLIARKKDWDPKKYGGFDSPTVAYSVLVVAKVEKGKSKKLKSVKELLGITIMERSSFEKNPIDFLEAKGYKEVKKDLIIKLPKYSLFELENGRKRMLASAGELQKGNELALPSKYVNFLYLASHYEKLKGSPEDNEQKQLFVEQHKHYLDEIIEQISEFSKRVILADANLDKVLSAYNKHRDKPIREQAENIIHLFTLTNLGAPAAFKYFDTTIDRKRYTSTKEVLDATLIHQSITGLYETRIDLSQLGGDGGGSPKKKRKVGGGGSGGRLEIRAAFLRQRNTALRTEVAELEQEVQRLENEVSQYETRYGPLGGGK

SEQ ID NO: 750 - protein, 810 aa, synthetic construct
MLEIEAAFLERENTALETRVAELRQRVQRLRNRVSQYRTRYGPLGGGKSGGSSGGSSGSETPGTSESATPESSGGSSGGSSKRTADGSEFESPKKKRKVLNIEDEYRLHETSKEPDVSLGSTWLSDFPQAWAETGGMGLAVRQAPLIIPLKATSTPVSIKQYPMSQEARLGIKPHIQRLLDQGILVPCQSPWNTPLLPVKKPGTNDYRPVQDLREVNKRVEDIHPTVPNPYNLLSGLPPSHQWYTVLDLKDAFFCLRLHPTSQPLFAFEWRDPEMGISGQLTWTRLPQGFKNSPTLFNEALHRDLADFRIQHPDLILLQYVDDLLLAATSELDCQQGTRALLQTLGNLGYRASAKKAQICQKQVKYLGYLLKEGQRWLTEARKETVMGQPTPKTPRQLREFLGKAGFCRLFIPGFAEMAAPLYPLTKPGTLFNWGPDQQKAYQEIKQALLTAPALGLPDLTKPFELFVDEKQGYAKGVLTQKLGPWRRPVAYLSKKLDPVAAGWPPCLRMVAAIAVLTKDAGKLTMGQPLVILAPHAVEALVKQPPDRWLSNARMTHYQALLLDTDRVQFGPVVALNPATLLPLPEEGLQHNCLDILAEAHGTRPDLTDQPLPDADHTWYTDGSSLLQEGQRKAGAAVTTETEVIWAKALPAGTSAQRAELIALTQALKMAEGKKLNVYTDSRYAFATAHIHGEIYRRRGWLTSEGKEIKNKDEILALLKALFLPKRLSIIHCPGHQKGHSAEARGNRMADQAARKAAITETPDTSTLLIENSSPSGGSKRTADGSEFEPKKKRKVGGSVSGWRLFKKIS

SEQ ID NO: 751 - protein, 8 aa, synthetic construct
HHHHHHHH

1. An engineered large serine integrase (eLSR) comprising one or more substitutions that substantially maintain or enhance integration activity at a pair of cognate integration recognition sites, and substantially decrease off-target integration activity at a pair of off-target integration recognition sites, when compared to a corresponding large serine integrase without said one or more substitutions (cLSR); optionally, said one or more substitutions are in a zinc ribbon domain (ZD) of the cLSR.

2. The eLSR of claim 1, wherein said cLSR comprises an amino acid sequence that is at least 80% identical to any one of: (a) SEQ ID NOs: 378-393; (b) SEQ ID NOs: 85-158 of WO2023/177424; and (c) SEQ ID NOs: 1-16 and 163-1162 and 3166-3175 of WO2023/070031.

3.-38. (canceled)

39. The eLSR of claim 1, wherein the eLSR is linked to a gene editor polypeptide.

40.-44. (canceled)

45. A polynucleotide comprising a nucleic acid sequence encoding the eLSR of claim 1.

46. The polynucleotide of claim 45, wherein the nucleic acid sequence encoding the eLSR and/or the fusion is codon optimized (e.g., codon-optimized for expression in a mammalian cell, such as a human cell).

47.-49. (canceled)

50. A vector comprising the polynucleotide of claim 45.

51. A host cell comprising the vector of claim 50.

52. A fusion protein, comprising:
(a) a DNA binding domain, optionally comprising a nickase activity;
(b) a reverse transcriptase; and
(c) an eLSR of claim 1,
wherein at least any two of elements (a), (b), or (c) are linked via at least a first C-terminal linker.

53. The fusion protein of claim 52, wherein the C-terminal linker comprises a sequence in Table 3.

54. A polynucleotide comprising a nucleic acid sequence encoding the fusion protein of claim 52.

55. A vector comprising the polynucleotide of claim 54.

56. A host cell comprising the vector of claim 55.

57. A system for site-specifically integrating a donor polynucleotide template into a mammalian cell genome at a target DNA sequence, comprising:
(1) an attachment site containing gRNA (atgRNA) comprising at least a portion of an at least first integration recognition site;
(2) a gene editor polypeptide comprising a DNA binding nickase domain linked to a reverse transcriptase domain capable of incorporating the integration recognition site into the target DNA sequence;
(3) an eLSR of claim 1; and
(4) a donor polynucleotide template linked to a sequence that is an integration cognate of the integration recognition site present in the atgRNA,
whereby the gene editor polypeptide site-specifically integrates the integration recognition site into the target DNA sequence, and,
whereby the eLSR integrates the donor polynucleotide template into the target DNA sequence at the integration recognition site.

58. The system of claim 57, wherein the first atgRNA comprises:
(i) a domain that is capable of guiding the gene editor polypeptide to the target DNA sequence; and
(ii) a reverse transcriptase (RT) template that comprises at least a portion of an at least first integration recognition site,
whereby the at least portion of the at least first integration recognition site is integrated into the genome of the cell at the target sequence.

59.-61. (canceled)

62. A method for site-specifically integrating a donor polynucleotide template into a mammalian cell genome at a target DNA sequence, comprising:
(1) incorporating an integration recognition site into the genome by delivering into the cell:
i) an attachment site-containing guide RNA (atgRNA) comprising at least a portion of an at least first integration recognition site; and
ii) a gene editor polypeptide or polynucleotide encoding the gene editor polypeptide, wherein the gene editor polypeptide comprises a DNA binding nickase domain linked to a reverse transcriptase domain, and is capable of incorporating the integration recognition site into the target DNA sequence; and
iii) optionally, a nicking gRNA; and
(2) integrating the donor polynucleotide template into the genome by delivering into the cell:
a) an eLSR of any one of claim 1; and
b) a donor polynucleotide template, wherein the donor polynucleotide template is linked to a sequence that is an integration cognate of the integration recognition site present in the atgRNA, and wherein the donor polynucleotide template is integrated into the genome at the incorporated genomic integration recognition site by the eLSR.

63. The method of claim 62, wherein the atgRNA, the gene editor polypeptide or polynucleotide encoding the gene editor polypeptide, the optional nicking gRNA, the eLSR, and the donor polynucleotide template are introduced into the cell concurrently.

64.-70. (canceled)

71. A cell comprising the fusion protein of claim 52.

72. The cell of claim 71, wherein the cell is a pleiopluripotent cell (such as an induced pluripotent stem cell) or a hematopoietic cell differentiated from a pleiopluripotent cell.

73.-75. (canceled)
